(19) United States
(12) Patent Application Publication
(10) Pub. No.: US 2024/0156961 A1
(43) Pub. Date: May 16, 2024

(54) TISSUE-SPECIFIC ANTIGENS FOR CANCER IMMUNOTHERAPY

(71) Applicant: BioNTech US Inc., Cambridge, MA (US)

(72) Inventors: Michael Steven Rooney, Boston, MA (US); Lauren Elizabeth Stopfer, Cambridge, MA (US)

(21) Appl. No.: 18/334,820

(22) Filed: Jun. 14, 2023

Related U.S. Application Data
(63) Continuation of application No. PCT/US21/62941, filed on Dec. 10, 2021.
(60) Provisional application No. 63/125,269, filed on Dec. 14, 2020.

(51) Int. Cl. A61K 39/00; A61P 35/00; A61P 37/04; C12N 5/0783

(52) U.S. Cl. CPC A61K 39/4632; A61K 39/0011; A61K 39/001193; A61K 39/4611; A61K 39/4644; A61P 35/00; A61P 37/04; C12N 5/0636; A61K 2039/53; C12N 2501/2301; C12N 2501/2307; C12N 2501/2315; C12N 2501/25; C12N 2501/26

(57) ABSTRACT

Provided herein are compositions relating to tissue-specific antigens, and methods for identifying tissue-specific antigens. Also provided herein are pharmaceutical compositions and methods of treatment that relate to tissue-specific antigens.

### CROSS REFERENCE

[0001] This application claims the benefit of U.S. Provisional Application No. 63/125,269, filed on Dec. 14, 2020, which is incorporated herein by reference in its entirety.

### SEQUENCE LISTING

[0002] The instant application contains a Sequence Listing which has been submitted electronically in XML format created on Jun. 14, 2023, is named 50401-727_601_SL.txt and is 7,722,446 bytes in size.

### BACKGROUND

[0003] Personalized immunotherapy using tumor-specific peptides has been described (Ott et al., Hematol. Oncol. Clin. N. Am. 28 (2014) 559-569). Prior to the present disclosure, cancer immunotherapies have mostly focused on epitopes thought to exhibit “tumor-specific” or “tumor-associated” expression patterns. Examples of such epitopes include MAGEA3, NY-ESO-1, and MSLN. Typically, these genes either suffer from low expression in tumors or non-negligible expression in essential normal tissues. These problems likely interfere with efficacy. However, focusing on tissue-specific antigens can change the scope of possible targets.

### SUMMARY

[0004] Provided herein are methods and compositions, including tissue-specific antigens not previously considered, such as tissue-specific antigens specific to non-essential tissues, that solve these problems. The tissue-specific epitope sequence can be expected to be presented on tumor cells or non-essential normal cells from a non-essential tissue of the same lineage and can be expected to have zero or a low expression level in essential tissues. The epitope sequence information of the tissue-specific antigens, e.g., antigens specific to a tumor from a particular tissue, can therefore be translated into therapeutic methods and compositions for diseases or conditions, e.g., cancer. In some embodiments the tissue-specific antigens are tumor antigens.

[0005] Provided herein is a composition comprising a tissue-specific antigen peptide comprising an epitope sequence of a protein encoded by a gene selected from the group consisting of ANKRD30A, COL10A1, CTCFL, PPIAL4G, POTEE, DLL3, MMP13, SSX1, DCAF4L2, MAGFA4, MAGEA11, MAGEC2, MAGEA12, PRAME, CLDN6, EPYC, KLK3, KLK2, KLK4, 1GM4, POTEG, RLN1, POTEH, SLC45A2, TSPAN10, PAGE5, CSAG1, PRDM7, TG, TSHR, RSPH6A, SCXB, HIST1H4K, ALPPL2, PRM2, PRM1, TNP1, LELP1, HMGB4, AKAP4, CETN1, UBQLN3, ACTL7A, ACTL9, ACTR12, PGK2, C2orJ33, KIF2B, ADAD1, SPATA8, CCDC70, TPD52L3, ACTL7B, DMRTB1, SYCN, CELA2A, CELA2B, PNLIPRP1, CTRC, AMY2A, SERPIN12, RBPJL, AQP12A, IAPP, KIRREL2, G6PC2, AQP12B, CYP11B1, CYP11B2, STAR, CYP11A1, and MC2R, wherein the protein is expressed by a cancer; a polynucleotide encoding the tissue-specific antigen peptide; one or more antigen presenting cells (APCs) comprising the tissue-specific antigen peptide; a T cell receptor (TCR) or an antibody, or a functional part thereof that is specific to an MHC:peptide complex, wherein the MHC:peptide complex comprises the tissue-specific antigen peptide; or a population of immune cells from a biological sample comprising at least one antigen specific T cell comprising the TCR.

[0006] In some embodiments, the tumor antigen epitope may comprise an epitope from any one of the proteins TSHR, TG, RSPH6A, SCXB, SSX1, or any combination thereof, and wherein the cancer comprises thyroid cancer.

[0007] Also provided herein is a population of T cells for cancer therapy for a human subject in need thereof, wherein the population of T cells comprises T cells that specifically recognize one of the epitope sequence of a protein encoded by a gene selected from the group consisting of ANKRD30A, COL10A1, CTCFL, PPIAL4G, POTEE, DLL3, MMP13, SSX1, DCAF4L2, MAGEA4, MAGEA11, MAGEC2, MAGEA12, PRAME, CLDN6, EPYC, KLK3, KLK2, KLK4, TGM4, POTEG, RLN1, POTEH, SLC45A2, TSPAN10, PAGE5, CSAG1, PRDM7, TG, TSHR, RSPH6A, SCXB, HIST1H4K, ALPPL2, PRM2, PRM1, TNP1, LELP1, HMGB4, AKAP4, CETN1, UBQLN3, ACTL7A, ACTL9, ACTRT2, PGK2, C2orf53. KIF2B, ADAD), SPATA8, CCDC70, TPD52L3, ACTL7B, DMRTB1, SYCN, CELA24, CELA2B, PNLIPRP1, CTRC, AMY2A, SERPINI2, RBPJL, AQP12A, IAPP, KIRREL2, G6PC2, AQP12B, CYP11B, CYP11B2, STAR, CYP11A1, and MC2R, wherein the epitope is expressed by a cancer cell of a human subject.

[0008] Provided herein is an improved ex vivo method for preparing tumor antigen-specific T cells, the method comprising: depleting CD14+ cells and/or CD25+ cells from a population of immune cells comprising antigen presenting cells (APCs) and T cells, thereby forming a CD14 and/or CD25 depleted population of immune cells comprising a first population of APCs and T cells, wherein the population of immune cells is from a biological sample from a human subject; and incubating the CD14 and/or CD25 depleted population of immune cells comprising a first population of APCs and T cells for a first time period in the presence of: FMS-like tyrosine kinase 3 receptor ligand (FLT3L), and (A) a polypeptide comprising at least one tumor antigen epitope sequence expressed by cancer cells of a human subject with cancer, or (B) a polynucleotide encoding the polypeptide; thereby forming a population of cells comprising stimulated T cells; expanding the population of cells comprising stimulated T cells, thereby forming an expanded population of cells comprising tumor antigen-specific T cells, wherein the tumor antigen-specific T cells comprise T cells that are specific to a complex comprising (i) the at least one tumor antigen epitope sequence and (ii) an MHC protein expressed by the cancer cells or APCs of the human subject of (b)(ii); and administering the expanded population of cells comprising tumor antigen-specific T cells to the human subject, wherein the tumor antigen epitope may be one or more of: ANKRD30A, COL10A1, CTCFL, PPIAL4G, POTEE, DLL3, MP13, SSX1, DCAF4L2, MAGEA4, MAGEA11, MAGEC2, MAGEA12, PRAME, CLDN6, EPYC, KLK3, KLK2, KLK4, TGM4, POTEG, RLN1, POTEH, SLC45A2, TSPAN10, PAGE5, CSAG1, PRDM7, TG, TSHR, RSPH6A, SCXB, HIST1H4K, ALPPL2, PRM2, PRM1, TNP1, LELP1, HMGB4, AKAP4, CETN1, UBQLN3, ACTL7A, ACTL9, ACMRT2, PGK2, C2orJ33, KIF2B, ADAD1, SPATA8, CCDC70, TPD52L3, ACTL7, DMRTB1, SYCN, CELA2A, CELA2B, PNLIPRP1, CTRC, AMY2A, SERPIN12, RBPJL, AQP12A, L4PP, KIRREL2, G6PC2, AQP12B, CYP11B1, CYP11B2, STAR, CYP11A1, and MC2R, wherein the epitope is expressed by a cancer cell of a human subject. In some embodiments, the tumor antigen epitope may comprise an epitope from any one of the proteins TSHR, TG, RSPH6A, SCXB, SSX1, or any combination thereof, and wherein the cancer comprises thyroid cancer.

[0009] Provided herein is a composition comprising a tissue-specific antigen peptide comprising an epitope sequence of a protein, wherein the epitope sequence has from 70% to 100% sequence identity to a peptide sequence selected from the group consisting of SEQ ID NOs 1-8962, wherein the protein is expressed by a cancer; a polynucleotide encoding the tissue-specific antigen peptide; one or more antigen presenting cells (APCs) presenting the tissue-specific antigen peptide; a T cell receptor (TCR) or an antibody, or a functional part thereof that is specific to an MHC:peptide complex, wherein the MHC:peptide complex comprises the tissue-specific antigen peptide; or a population of immune cells from a biological sample comprising at least one antigen specific T cell comprising the TCR.

[0010] Provided herein is a composition comprising: a tissue-specific antigen peptide comprising an epitope sequence of a protein, wherein the protein is expressed by a tumor of a target tissue; a polynucleotide encoding the tissue-specific antigen peptide; one or more antigen presenting cells (APCs) presenting the tissue-specific antigen peptide; a T cell receptor (TCR) or an antibody, or a functional part thereof that is specific to an MHC:peptide complex, wherein the MHC:peptide complex comprises the tissue-specific antigen peptide; or a population of immune cells from a biological sample comprising at least one antigen specific T cell comprising the TCR: wherein the epitope sequence binds to or is predicted to bind to a protein encoded by a MHC allele expressed by a human subject, and wherein the protein is encoded by a tissue-specific antigen epitope gene that has an expression level in the target tissue that is at least 2 fold more than an expression level of the tissue-specific antigen gene in each tissue of a plurality of non-target tissues that are different than the target tissue.

[0011] In some embodiments, the epitope sequence has from 70% to 100% sequence identity to a peptide sequence selected from the group consisting of SEQ ID NOs 6846 7061, 7359-7448, 7629-8099, and 8619-8744, and wherein the cancer comprises thyroid cancer.

[0012] In some embodiments, the protein comprises RBPJL, AQP12A, AQP12B, IAPP, CELA2A, CELA2B, AMY2A, CTRC, G6PC2, KIRREL2, PNLIPRP1, SERPINI2, SYNC, or any combination thereof, and wherein the cancer comprises pancreatic cancer.

[0013] In some embodiments, the epitope sequence has from 70% to 100% sequence identity to a peptide sequence selected from the group consisting of SEQ ID NOs 720-814, 989-1182, 1373-1565, 2120-2211, 2920-3009, 3101-3196, 3320-3440, 5193-5284, 6487-6579, 7062-7150, and 7539-7628, and wherein the cancer comprises pancreatic cancer.

[0014] In some embodiments, the protein comprises CYP11A1, CYP11B1, CYP11B2, MC2R, STAR, or any combination thereof, and wherein the cancer comprises adrenal cancer.

[0015] In some embodiments, the epitope sequence has from 70% to 100% sequence identity to a peptide sequence selected from the group consisting of SEQ ID NOs 2212-2523, 4817-4915, and 7449-7538, and wherein the cancer comprises adrenal cancer.

[0016] In some embodiments, the protein comprises ALPPL2, POTEE, PRAME, or any combination thereof, and wherein the cancer comprises uterine cancer.

[0017] In some embodiments, the epitope sequence has from 70% to 100% sequence identity to a peptide sequence selected from the group consisting of SEQ ID NOs 627-719, 5285-5431, and 6085-6183, and wherein the cancer comprises uterine cancer.

[0018] In some embodiments, the protein comprises KLK2, KLK3, KLK4, POTEH, POTEG, TGM4, RLN1, POTEE, PPIAL4G or any combination thereof, and wherein the cancer comprises prostate cancer.

[0019] In some embodiments, the epitope sequence has from 70% to 100% sequence identity to a peptide sequence selected from the group consisting of SEQ ID NOs 3441-4274, 5285-6084, 6580-6845, and 8100-8434, and wherein the cancer comprises prostate cancer.

[0020] In some embodiments, the protein comprises ANKRD30A, COL10A1, or a combination thereof and wherein the cancer comprises breast cancer.

[0021] In some embodiments, the epitope sequence has from 70% to 100% sequence identity to a peptide sequence selected from the group consisting of SEQ ID NOs 815-988, and 1749-1867, and wherein the cancer comprises breast cancer.

[0022] In some embodiments, the protein comprises CTCFL, PRAME, CLDN6, EPYC, or any combination thereof, and wherein the cancer comprises ovarian cancer.

[0023] In some embodiments, the epitope sequence has from 70% to 100% sequence identity to a peptide sequence selected from the group consisting of SEQ ID NOs 1659-1748, 1964-2119, 2827-2919, and 6085-6183, and wherein the cancer comprises ovarian cancer.

[0024] In some embodiments, the protein comprises CTCFL, and wherein the cancer comprises cervical cancer.

[0025] In some embodiments, the epitope sequence has from 70% to 100% sequence identity to a peptide sequence selected from the group consisting of SEQ ID NOs 1964-2119, and wherein the cancer comprises cervical cancer.

[0026] In some embodiments, the protein comprises POTEE, PPIAL4G, or a combination thereof, and wherein the cancer comprises colorectal cancer.

[0027] In some embodiments, the epitope sequence has from 70% to 100% sequence identity to a peptide sequence selected from the group consisting of SEQ ID Nos 5285-5431, and 5996-6084, and wherein the cancer comprises colorectal cancer.

[0028] In some embodiments, the protein comprises DLL3, and wherein the cancer comprises glioma.

[0029] In some embodiments, the epitope sequence has from 70% to 100% sequence identity to a peptide sequence selected from the group consisting of SEQ ID Nos 2619-2736, and wherein the cancer comprises glioma.

[0030] In some embodiments, the protein comprises MMP13, and wherein the cancer comprises head and neck cancer.

[0031] In some embodiments, the epitope sequence has from 70% to 100% sequence identity to a peptide sequence selected from the group consisting of SEQ ID Nos 4916-5010, and wherein the cancer comprises head and neck cancer.

[0032] In some embodiments, the protein comprises DCAF4L2, SSX1, or a combination thereof, and wherein the cancer comprises liver cancer.

[0033] In some embodiments, the epitope sequence has from 70% to 10(0% sequence identity to a peptide sequence selected from the group consisting of SEQ ID Nos 2524-2618, and 7359-7448, and wherein the cancer comprises liver cancer.

[0034] In some embodiments, the protein comprises SSX1, MAGEA4, PRAME, CSAG1, MAGEA12, MAGEA2, MAGEC2, PAGE5, PRDM7, SLC45A2, TSPAN10, or any combination thereof, and wherein the cancer comprises melanoma.

[0035] In some embodiments, the epitope sequence has from 70% to 100% sequence identity to a peptide sequence selected from the group consisting of SEQ ID Nos 1868-1963, 4458-4550, 4551-4637, 4638-4728, 4729-4816, 5011-5100, 6085-6183, 6184-6307, 7151-7264, 7359-7448, and 8745-8835, and wherein the cancer comprises melanoma.

[0036] In some embodiments, the protein comprises MAGEA11, MAGEA4, PRAME, or any combination thereof, and wherein the cancer comprises lung squamous cell carcinoma.

[0037] In some embodiments, the epitope sequence has from 70% to 100% sequence identity to a peptide sequence selected from the group consisting of SEQ ID Nos 4368-4457, 4638-4728, and 6085-6183, and wherein the cancer comprises lung squamous cell carcinoma.

[0038] In some embodiments, the protein comprises ACTL7A, ACTL7B, ACTL9, ACTRT2, ADAD1, AKAP4, C2orf53, CCDC70, CETN1, DMRTB1, HMGB4, KIF2B, LELP1, PGK2, PRM1, PRM2, SPATA8, TNP1, TPD52L3, UBQLN3, or any combination thereof, and wherein the cancer comprises testicular cancer.

[0039] In some embodiments, the epitope sequence has from 70% to 100% sequence identity to a peptide sequence selected from the group consisting of SEQ ID Nos 1-626, 1183-1372, 1566-1658, 2737-2826, 3010-3100, 3197-3319, 4275-4367, 5101-5192, 6308-6486, 7265-7358, 8435-8618, and 8836-8962, and wherein the cancer comprises testis cancer.

[0040] In some embodiments, the protein comprises KLK2, KLK3, KLK4, ANKRD30A, PRAME, MAGE4, or a combination thereof.

[0041] In some embodiments, the protein comprises KLK2, KLK3 or KLK4; and wherein the cancer comprises prostate cancer. In some embodiments, the epitope sequence has from 70% to 100% sequence identity to a peptide sequence selected from the group consisting of AYSEKVTEF (SEQ ID NO: 3534), GLWTGGKDTCGV (SEQ ID NO: 3468), HPEDTGQVF (SEQ ID NO: 3988), HPEYNRPLL (SEQ ID NO: 4143), QRVPVSHSF (SEQ ID NO: 3544), SESDTIRSI (SEQ ID NO: 4176), SLFHPEDTGQV (SEQ ID NO: 3775), SLQCVSLHL (SEQ ID NO: 3456), VILLGRHSL (SEQ ID NO: 3891), VLVHPQWVL (SEQ ID NO: 3757), LFHPEDTGQVF (SEQ ID NO: 3827), RPRSLQCVSL (SEQ ID NO: 3578), GYLQGLVSF (SEQ ID NO: 4094), IRNKSVILL (SEQ ID NO: 3974), KLQCVDLHV (SEQ ID NO: 3740), LLANGRMPTV (SEQ ID NO: 4029), LRPGDDSTL (SEQ ID NO: 3767), MPALPMVL (SEQ ID NO: 3874), NRPLLANDL (SEQ ID NO: 4216), SLQCVSLHL (SEQ ID NO: 3456), TWIAPPLQV (SEQ ID NO: 3784), VFQVSHSF (SEQ ID NO: 3828) and YSEKVTEFML (SEQ ID NO: 3454). In some embodiments, the epitope sequence has from 70% to 100% sequence identity to a peptide sequence selected from the group consisting of AYSEKVTEF (SEQ ID NO: 3534), HPEDTGQVF (SEQ ID NO: 3988), HPEYNRPLL (SEQ ID NO: 4143), QRVPVSHSF (SEQ ID NO: 3544), LFHPEDTGQVF (SEQ ID NO: 3827), GYLQGLVSF (SEQ ID NO: 4094), IRNKSVILL (SEQ ID NO: 3974), KLQCVDLHV (SEQ ID NO: 3740), LLANGRMPTV (SEQ ID NO: 4029), LRPGDDSTL (SEQ ID NO: 3767), MPALPMVL (SEQ ID NO: 3874), NRPLLANDL (SEQ ID NO: 4216), SLQCVSLHL (SEQ ID NO: 3456), TWIAPPLQV (SEQ ID NO: 3784), VFQVSHSF (SEQ ID NO: 3828) and YSEKVTEFML (SEQ ID NO: 3454).

[0042] In some embodiments, the protein comprises ANKRD30A; and wherein the cancer comprises breast cancer. In some embodiments, the epitope sequence has from 70% to 100% sequence identity to a peptide sequence selected from the group consisting of LLSHGAVIEV (SEQ ID NO: 831), SIPTKALEL (SEQ ID NO: 942), SQYSGQLKV (SEQ ID NO: 927), SVPNKALEL (SEQ ID NO: 941), SLSKILDTV (SEQ ID NO: 826) and SLDQKLFQL (SEQ ID NO: 827). In some embodiments, the epitope sequence has from 70% to 100% sequence identity to a peptide sequence selected from the group consisting of LLSHGAVIEV (SEQ ID NO: 831), SIPTKALEL (SEQ ID NO: 942), SVPNKALEL (SEQ ID NO: 941), SLSKILDTV (SEQ ID NO: 826) and SLDQKLFQL (SEQ ID NO: 827).

[0043] In some embodiments, the protein comprises PRAME; and wherein the cancer comprises squamous cell lung cancer: melanoma; ovarian cancer, uterine cancer, or am combination thereof. In some embodiments, the epitope sequence has from 70% to 100% sequence identity to a peptide sequence selected from the group consisting of DSLFFLRGR (SEQ ID NO: 6132), ELFSYLIEK (SEQ ID NO: 6108), FYDPEPILC (SEQ ID NO: 6166), ISISALQSL (SEQ ID NO: 6161), ITDDQLLAL (SEQ ID NO: 6158), KRKKNVLRL (SEQ ID NO: 6173), LQSLLQHLI (SEQ ID NO: 6146), LSHIHASSY (SEQ ID NO: 6152), PYLGQMINL (SEQ ID NO: 6120), QLLALLPSL (SEQ ID NO: 6093), SFYGNSISI (SEQ ID NO: 6174), SLLQHLIGL (SEQ ID NO: 6095), SPSVSQLSVL (SEQ ID NO: 6139), SPYLGQMINL (SEQ ID NO: 6138), TSPRRLVEL (SEQ ID NO: 6159), VLYPVPLESY (SEQ ID NO: 6154), VSPEPLQAL (SEQ ID NO: 6156), YLHARLREL (SEQ ID NO:6157) and RLDQLLRHV (SEQ ID NO:6104). In some embodiments, the epitope sequence has from 70% to 100% sequence identity to a peptide sequence of SLLQHLIGL (SEQ ID NO: 6095).

[0044] In some embodiments, the protein comprises MAGE4; and wherein the cancer comprises squamous cell lung cancer. In some embodiments, the epitope sequence has from 70% to 100% sequence identity to a peptide sequence selected from the group consisting of EVDPASNTY (SEQ ID NO: 4638), GVYDGREHTV (SEQ ID NO: 4653), KEVDPASNTY (SEQ ID NO: 4640), KVDELAHFL (SEQ ID NO: 4648), QIFPKTGL (SEQ ID NO: 4692), QSPQGASAL (SEQ ID NO: 4707), SALPTTISF (SEQ ID NO: 4699), TVYGEPRKL (SEQ ID NO: 4722), VYGEPRKL (SEQ ID NO: 4727), YPSLREAAL (SEQ ID NO: 4689), ALLEEEEGV (SEQ ID NO: 4698) and KVLEHVVRV (SEQ ID NO: 4697). In some embodiments, the epitope sequence has from 70% to 100% sequence identity to a peptide sequence selected from the group consisting of EVDPASNTY (SEQ ID NO: 4638), GVYDGREHTV (SEQ ID NO: 4653), KVDELAHFL (SEQ ID NO: 4648) and KVLEHVVRV (SEQ ID NO: 4697).

[0045] In some embodiments, the target tissue is a non-essential tissue.

[0046] In some embodiments, each non-target tissue is an essential tissue.

[0047] In some embodiments, tissue-specific antigen peptide is an isolated, purified, and/or synthetic peptide.

[0048] In some embodiments, the tissue-specific antigen peptide further comprises an accessory sequence flanking the epitope sequence.

[0049] In some embodiments, the polynucleotide comprises deoxyribonucleic acid (DNA).

[0050] In some embodiments, the polynucleotide comprises ribonucleic acid (RNA).

[0051] In some embodiments, the composition comprises a viral vector containing the polynucleotide.

[0052] In some embodiments, the viral vector is an adenovirus viral vector, an adeno-associated virus (AAV) viral vector, a Herpes Simplex virus (HSV) viral vector, a Semliki Forest Virus (SFV) viral vector, a lentivirus viral vector, a retrovirus viral vector, a poxvirus viral vector, an alpha virus viral vector, a vaccinia virus viral vector, a hepatitis B virus (HBV) viral vector, a human papillomavirus viral vector, or a pseudotype thereof, or any combination thereof.

[0053] In some embodiments, the tissue-specific antigen peptide activates CD8+ T cells, CD4+ T cells, or both.

[0054] Provided herein is a composition for autologous T cell therapy for a cancer in a subject in need thereof, wherein the composition comprises a population of T cells expressing an antigen specific TCR, wherein the antigen is a cancer antigen as disclosed herein. Contemplated is a population of immune cells from a biological sample comprising at least one antigen specific T cell comprising the TCR: wherein the epitope sequence binds to or is predicted to bind to a protein encoded by a MHC allele expressed by the human subject in need of the autologous T cell therapy, and the TCR binds to the epitope when presented in a complex by the protein encoded by a MHC allele expressed by the human subject, wherein the epitope is a tissue specific epitope that is encoded by a tissue-specific antigen epitope gene that has an expression level in the target tissue that is at least 2 fold more than an expression level of the tissue-specific antigen gene in each tissue of a plurality of non-target tissues that are different than the target tissue. In some embodiments, the T cell is a non-engineered cell. In some embodiments, the T cell is autologous to the subject. In some embodiments, the T cell is modified ex vivo.

[0055] In some embodiments, the TCR is specific to the tissue-specific antigen peptide in a complex with a class I MHC protein or a class II MHC protein.

[0056] In some embodiments, the at least one antigen specific T cell expresses CD8 or CD4.

[0057] In some embodiments, the at least one antigen specific T cell comprise an exogenous polynucleotide encoding the TCR.

[0058] In some embodiments, the at least one antigen specific T cell comprises a TCR that is specific for an epitope sequence that has from 70% to 100% sequence identity to a peptide sequence selected from the group consisting of SEQ ID NOs 6846-7061, 7359-7448, 7629-8099, and 8619-8744, and wherein the cancer comprises thyroid cancer.

[0059] In some embodiments, the at least one antigen specific T cell comprises a TCR that is specific for an epitope sequence from the protein RBPJL, AQP12A, AQP12B, IAPP, CELA2A, CELA2B, AMY2A, CTRC, G6PC2, KIRREL2, PNLIPRP1, SERPINI2, SYNC, or any combination thereof, and wherein the cancer comprises pancreatic cancer.

[0060] In some embodiments, the at least one antigen specific T cell comprises a TCR that is specific for an epitope sequence that has from 70% to 100% sequence identity to a peptide sequence selected from the group consisting of SEQ ID NOs 720-814, 989-1182, 1373-1565, 2120-2211, 2920-3009, 3101-3196, 3320-3440, 5193-5284, 6487-6579, 7062-7150, and 7539-7628, and wherein the cancer comprises pancreatic cancer.

[0061] In some embodiments, the at least one antigen specific T cell comprises a TCR that is specific for an epitope sequence from the protein: CYP11A1, CYP11B1, CYP11B2, MC2R, STAR, or any combination thereof, and wherein the cancer comprises adrenal cancer.

[0062] In some embodiments, the at least one antigen specific T cell comprises a TCR that is specific for an epitope sequence that has from 70% to 100% sequence identity to a peptide sequence selected from the group consisting of SEQ ID NOs 2212-2523, 4817-4915, and 7449-7538, and wherein the cancer comprises adrenal cancer.

[0063] In some embodiments, the at least one antigen specific T cell comprises a TCR that is specific for an epitope sequence from the protein: ALPPL2, POTEE, PRAME, or any combination thereof, and wherein the cancer comprises uterine cancer.

[0064] In some embodiments, the at least one antigen specific T cell comprises a TCR that is specific for an epitope sequence that has from 70% to 100% sequence identity to a peptide sequence selected from the group consisting of SEQ ID NOs 627-719, 5285-5431, and 6085-6183, and wherein the cancer comprises uterine cancer.

[0065] In some embodiments, the at least one antigen specific T cell comprises a TCR that is specific for an epitope sequence from the protein: KLK2, KLK3, KLK4, POTEH, POTEG, TGM4, RLN1, POTEE, PPIAL4G or any combination thereof, and wherein the cancer comprises prostate cancer.

[0066] In some embodiments, the at least one antigen specific T cell comprises a TCR that is specific for an epitope sequence that has from 70% to 100% sequence identity to a peptide sequence selected from the group consisting of SEQ ID NOs 3441-4274, 5285-6084, 6580-6845, and 8100-8434, and wherein the cancer comprises prostate cancer.

[0067] In some embodiments, the at least one antigen specific T cell comprises a TCR that is specific for an epitope sequence from the protein: ANKRD30A, COL10A1, or a combination thereof and wherein the cancer comprises breast cancer.

[0068] In some embodiments, the at least one antigen specific T cell comprises a TCR that is specific for an epitope sequence that has from 70% to 100% sequence identity to a peptide sequence selected from the group consisting of SEQ ID NOs 815-988, and 1749-1867, and wherein the cancer comprises breast cancer.

[0069] In some embodiments, the at least one antigen specific T cell comprises a TCR that is specific for an epitope sequence from the protein: CTCFL, PRAME, CLDN6, EPYC, or any combination thereof, and wherein the cancer comprises ovarian cancer.

[0070] In some embodiments, the at least one antigen specific T cell comprises a TCR that is specific for an epitope sequence that has from 70% to 100% sequence identity to a peptide sequence selected from the group consisting of SEQ ID NOs 1659-1748, 1964-2119, 2827-2919, and 6085-6183, and wherein the cancer comprises ovarian cancer.

[0071] In some embodiments, the at least one antigen specific T cell comprises a TCR that is specific for an epitope sequence from the protein: CTCFL, and wherein the cancer comprises cervical cancer.

[0072] In some embodiments, the at least one antigen specific T cell comprises a TCR that is specific for an epitope sequence that has from 70% to 100% sequence identity to a peptide sequence selected from the group consisting of SEQ ID NOs 1964-2119, and wherein the cancer comprises cervical cancer.

[0073] In some embodiments, the at least one antigen specific T cell comprises a TCR that is specific for an epitope sequence from the protein: POTEE, PPIAL4G, or a combination thereof, and wherein the cancer comprises colorectal cancer.

[0074] In some embodiments, the at least one antigen specific T cell comprises a TCR that is specific for an epitope sequence that has from 70% to 100% sequence identity to a peptide sequence selected from the group consisting of SEQ ID Nos 5285-5431, and 5996-6084, and wherein the cancer comprises colorectal cancer.

[0075] In some embodiments, the at least one antigen specific T cell comprises a TCR that is specific for an epitope sequence from the protein, DLL3, and wherein the cancer comprises glioma.

[0076] In some embodiments, the at least one antigen specific T cell comprises a TCR that is specific for an epitope sequence that has from 70% to 100% sequence identity to a peptide sequence selected from the group consisting of SEQ ID Nos 2619-2736, and wherein the cancer comprises glioma.

[0077] In some embodiments, the at least one antigen specific T cell comprises a TCR that is specific for an epitope sequence from the protein, MMP13, and wherein the cancer comprises head and neck cancer.

[0078] In some embodiments, the at least one antigen specific T cell comprises a TCR that is specific for an epitope sequence that has from 70% to 100% sequence identity to a peptide sequence selected from the group consisting of SEQ ID Nos 4916-5010, and wherein the cancer comprises head and neck cancer.

[0079] In some embodiments, the at least one antigen specific T cell comprises a TCR that is specific for an epitope sequence from the protein, DCAF4L2, or SSX1, or a combination thereof, and wherein the cancer comprises liver cancer.

[0080] In some embodiments, the at least one antigen specific T cell comprises a TCR that is specific for an epitope sequence that has from 70% to 100% sequence identity to a peptide sequence selected from the group consisting of SEQ ID Nos 2524-2618, and 7359-7448, and wherein the cancer comprises liver cancer.

[0081] In some embodiments, the at least one antigen specific T cell comprises a TCR that is specific for an epitope sequence from the protein: SSX1, MAGEA4, PRAME, CSAG1, MAGEA12, MAGEA2, MAGEC2, PAGE5, PRDM7, SLC45A2, TSPAN10, or any combination thereof, and wherein the cancer comprises melanoma.

[0082] In some embodiments, the at least one antigen specific T cell comprises a TCR that is specific for an epitope sequence that has from 70% to 100% sequence identity to a peptide sequence selected from the group consisting of SEQ ID Nos 1868-1963, 4458-4550, 4551-4637, 4638-4728, 4729-4816, 5011-5100, 6085-6183, 6184-6307, 7151-7264, 7359-7448, and 8745-8835, and wherein the cancer comprises melanoma.

[0083] In some embodiments, the at least one antigen specific T cell comprises a TCR that is specific for an epitope sequence from the protein: MAGEA11, MAGEA4, PRAME, or any combination thereof, and wherein the cancer comprises lung squamous cell carcinoma.

[0084] In some embodiments, the at least one antigen specific T cell comprises a TCR that is specific for an epitope sequence that has from 70% to 100% sequence identity to a peptide sequence selected from the group consisting of SEQ ID Nos 4368-4457, 4638-4728, and 6085-6183, and wherein the cancer comprises lung squamous cell carcinoma.

[0085] In some embodiments, the at least one antigen specific T cell comprises a TCR that is specific for an epitope sequence from the protein: ACTL7A, ACTL7B, ACTL9, ACTRT2, ADAD1, AKAP4, C2orf53, CCDC70, CETN1, DMRTB1, HMGB4, KIF2B, LELP1, PGK2, PRM1, PRM2, SPATA8, TNP1, TPD52L3, UBQLN3, or any combination thereof, and wherein the cancer comprises testicular cancer.

[0086] In some embodiments, the at least one antigen specific T cell comprises a TCR that is specific for an epitope sequence that has from 70% to 100% sequence identity to a peptide sequence selected from the group consisting of SEQ ID Nos 1-626, 1183-1372, 1566-1658, 2737-2826, 3010-3100, 3197-3319, 4275-4367, 5101-5192, 6308-6486, 7265-7358, 8435-8618, and 8836-8962, and wherein the cancer comprises testis cancer.

[0087] In some embodiments, the composition comprises the at least one antigen specific T cell, and wherein the tissue-specific antigen peptide comprises an epitope sequence of a protein encoded by a gene selected from the group consisting of: ANKRD30A, DLL3, PRAME, CLDN6, EPYC, SLC45A2, TSPAN10, TSHR, LELP1, AQP12A, KIRREL2, G6PC2, AQP12B, and MC2R.

[0088] In some embodiments, the biological sample is from a subject with the cancer or a donor other than a subject with the cancer.

[0089] In some embodiments, the donor has a natural immune response to the tissue-specific antigen peptide.

[0090] In some embodiments, the cancer comprises prostate cancer, and wherein the donor is female.

[0091] In some embodiments, the cancer comprises breast cancer or ovarian cancer, and wherein the donor is male.

[0092] In some embodiments, the protein is encoded by a tissue-specific antigen epitope gene that has an mRNA expression level in each non-target tissue of a plurality of non-target tissues that are different than a target tissue of the tumor that is at most about 5 mRNA transcripts per one million total mRNA transcripts in each respective non-target tissue.

[0093] In some embodiments, the protein is encoded by a tissue-specific antigen epitope gene that has an mRNA expression level in a target tissue that is at least about 100 mRNA transcripts per one million total mRNA transcripts in the target tissue.

[0094] Provided herein is a pharmaceutical composition comprising a composition described herein, and a pharmaceutically acceptable carrier.

[0095] Provided herein is a method comprising identifying an epitope sequence, wherein the epitope sequence binds to or is predicted to bind to a protein encoded by a MHC allele expressed by a human subject, and is encoded by a tissue-specific antigen epitope gene that has an expression level in a tumor from a target tissue that is at least 2 fold greater than an expression level of the tissue-specific antigen epitope gene in each tissue of a plurality of non-target tissues that are different than the target tissue.

[0096] Provided herein is a method of preparing T cells comprising a T cell receptor (TCR) specific to a complex of (i) a epitope sequence of a tissue specific antigen peptide of a protein and (ii) a protein encoded by an HLA allele of a human subject, the method comprising: incubating T cells in the presence of antigen presenting cells (APCs) comprising the epitope sequence, wherein the APCs express the protein encoded by an HLA allele of a human subject.

[0097] In some embodiments, the APCs comprise a polypeptide comprising the epitope sequence or a polynucleotide encoding a polypeptide comprising the epitope sequence. In some embodiments, the APCs are APCs from a human subject. In some embodiments, the T cells are T cells from a human subject. In some embodiments, the method further comprises administering the T cells to a human subject in need thereof.

[0098] Provided herein is a method of treatment, comprising: administering a composition to a human subject in need thereof, wherein the composition comprises: a tissue-specific antigen peptide comprising an epitope sequence of a protein, wherein the epitope sequence is expressed by the tumor; a polynucleotide encoding the tissue-specific antigen peptide; one or more antigen presenting cells (APCs) presenting the tissue-specific antigen peptide; a T cell receptor (TCR) specific to the tissue-specific antigen peptide; or a population of immune cells from a biological sample comprising at least one antigen specific T cell comprising the TCR, wherein the epitope sequence binds to or is predicted to bind to a protein encoded by a MHC allele expressed by the human subject, and wherein the protein is encoded by a tissue-specific antigen epitope gene that has an expression level in the tumor that is at least 2 fold more than an expression level of the tissue-specific antigen gene in each tissue of a plurality of non-target tissues that are different than the target tissue.

[0099] In some embodiments, each tissue of the plurality of tissues is an essential tissue.

[0100] In some embodiments, the plurality of tissues comprise skeletal muscle, coronary artery, heart, adipose, uterus, vagina, skin, salivary gland, brain, lung, esophagus, stomach, colon, small intestine, nerve, or any combination thereof.

[0101] In some embodiments, each non-target tissue of the plurality of non-target tissues is a non-essential tissue.

[0102] In some embodiments, the MHC allele is a class I MHC allele or a class II MHC allele.

[0103] Provided herein is a method of treating a cancer, comprising: administering a composition described herein to a subject in need thereof.

[0104] In some embodiments, the cancer comprises adrenal gland cancer, breast cancer, cervical cancer, colorectal cancer, fallopian tube cancer, glioma, head and neck cancer, liver cancer, squamous cell lung cancer, melanoma, ovarian cancer, pancreatic cancer, prostate cancer, testicular cancer, thyroid cancer, uterine cancer, or any combination thereof.

[0105] In some embodiments, the protein comprises KLK2, KLK3, KLK4, ANKRD30A, PRAME, MAGE4, or a combination thereof. In some embodiments, the protein comprises KLK2, KLK3 or KLK4; and wherein the cancer comprises prostate cancer. In some embodiments, the epitope sequence is AYSEKVTEF (SEQ ID NO: 3534) and the human subject expresses a protein encoded by an HLA-C06:02 or HLA-A24:02 allele, the epitope sequence is GLWTGGKDTCGV (SEQ ID NO: 3468) and the human subject expresses a protein encoded by an HLA-A02:01 allele, the epitope sequence is HPEDTGQVF (SEQ ID NO: 3988) and the human subject expresses a protein encoded by an HLA-C*04:01 or HLA-C07:01 allele, the epitope sequence is HPEYNRPLL (SEQ ID NO: 4143) and the human subject expresses a protein encoded by an HLA-C*07:01 or HLA-B07:02 allele, the epitope sequence is QRVPVSHSF (SEQ ID NO: 3544) and the human subject expresses a protein encoded by an HLA-C*07:01, HLA-C*07:02 or HLA-A24:02 allele, the epitope sequence is SESDTIRSI (SEQ ID NO: 4176) and the human subject expresses a protein encoded by an HLA-B13:02 allele, the epitope sequence is SLFHPEDTGQV (SEQ ID NO: 3775) and the human subject expresses a protein encoded by an HLA-A02:01 allele, the epitope sequence is SLQCVSLHL (SEQ ID NO: 3456) and the human subject expresses a protein encoded by an HLA-A02:01 allele, the epitope sequence is VILLGRHSL (SEQ ID NO: 3891) and the human subject expresses a protein encoded by an HLA-B08:01 allele, the epitope sequence is VLVHPQWVL (SEQ ID NO: 3757) and the human subject expresses a protein encoded by an HLA-A02:01 allele, the epitope sequence is LFHPEDTGQVF (SEQ ID NO: 3827) and the human subject expresses a protein encoded by an HLA-A24:02 allele, the epitope sequence is RPRSLQCVSL (SEQ ID NO: 3578) and the human subject expresses a protein encoded by an HLA-B07:02 allele, the epitope sequence is GYLQGLVSF (SEQ ID NO: 4094) and the human subject expresses a protein encoded by an HLA-A24:02 allele, the epitope sequence is IRNKSVILL (SEQ ID NO: 3974) and the human subject expresses a protein encoded by an HLA-C*06:02, HLA-C*07:02 or HLA-C07:01 allele, the epitope sequence is KLQCVDLHV (SEQ ID NO: 3740) and the human subject expresses a protein encoded by an HLA-A02:01 allele, the epitope sequence is LLANGRMPTV (SEQ ID NO: 4029) and the human subject expresses a protein encoded by an HLA-A02:01 allele, the epitope sequence is LRPGDDSTL (SEQ ID NO: 3767) and the human subject expresses a protein encoded by an HLA-C07:02 allele, the epitope sequence is MPALPMVL (SEQ ID NO: 3874) and the human subject expresses a protein encoded by an HLA-B07:02 allele, the epitope sequence is NRPLLANDL (SEQ ID NO: 4216) and the human subject expresses a protein encoded by an HLA-C*06:02, HLA-C*07:02 or HLA-C01:02 allele, the epitope sequence is SLQCVSLHL (SEQ ID NO: 3456) and the human subject expresses a protein encoded by an HLA-A02:01 allele, the epitope sequence is TWIAPPLQV (SEQ ID NO: 3784) and the human subject expresses a protein encoded by an HLA-C*04:01 or HLA-A02:01 allele, the epitope sequence is VFQVSHSF (SEQ ID NO: 3828) and the human subject expresses a protein encoded by an HLA-C*07:02 or HLA-A24:02 allele, or the epitope sequence is YSEKVTEFML (SEQ ID NO: 3454) and the human subject expresses a protein encoded by an HLA-A01:01 allele.

[0106] In some embodiments, the protein comprises ANKRD30A; and wherein the cancer comprises breast cancer. In some embodiments, the epitope sequence is LLSHGAVIEV (SEQ ID NO: 831) and the human subject expresses a protein encoded by an HLA-A02:01 allele, the epitope sequence is SQYSGQLKV (SEQ ID NO: 927) and the human subject expresses a protein encoded by an HLA-B13:02 allele, the epitope sequence is SVPNKALEL (SEQ ID NO: 941) and the human subject expresses a protein encoded by an HLA-C*04:01 or HLA-C01:02 allele, the epitope sequence is SLSKILDTV (SEQ ID NO: 826) and the human subject expresses a protein encoded by an HLA-A02:01 allele, the epitope sequence is SIPTKALEL (SEQ ID NO: 942) and the human subject expresses a protein encoded by an HLA-C*04:01 or HLA-C01:02 allele, or the epitope sequence is SLDQKLFQL (SEQ ID NO: 827) and the human subject expresses a protein encoded by an HLA-A02:01 allele.

[0107] In some embodiments, the protein comprises PRAME; and wherein the cancer comprises squamous cell lung cancer; melanoma: ovarian cancer, uterine cancer, or any combination thereof. In some embodiments, the epitope sequence is DSLFFLRGR (SEQ ID NO: 6132) and the human subject expresses a protein encoded by an HLA-A33:03 allele, the epitope sequence is ELFSYLIEK (SEQ ID NO: 6108) and the human subject expresses a protein encoded by an HLA-A03:01 allele, the epitope sequence is FYDPEPILC (SEQ ID NO: 6166) and the human subject expresses a protein encoded by an HLA-C04:01 allele, the epitope sequence is ISISALQSL (SEQ ID NO: 6161) and the human subject expresses a protein encoded by an HLA-C03:04 allele, the epitope sequence is ITDDQLLAL (SEQ ID NO: 6158) and the human subject expresses a protein encoded by an HLA-A01:01 allele, the epitope sequence is KRKKNVLRL (SEQ ID NO: 6173) and the human subject expresses a protein encoded by an HLA-C07:01 allele, the epitope sequence is LQSLLQHLI (SEQ ID NO: 6146) and the human subject expresses a protein encoded by an HLA-B13:02 allele, the epitope sequence is LSHIHASSY (SEQ ID NO: 6152) and the human subject expresses a protein encoded by an HLA-B46:01 allele, the epitope sequence is PYLGQMINL (SEQ ID NO: 6120) and the human subject expresses a protein encoded by an HLA-A24:02 allele, the epitope sequence is QLLALLPSL (SEQ ID NO: 6093) and the human subject expresses a protein encoded by an HLA-A02:01 allele, the epitope sequence is SFYGNSISI (SEQ ID NO: 6174) and the human subject expresses a protein encoded by an HLA-C07:01 allele, the epitope sequence is SLLQHLIGL (SEQ ID NO: 6095) and the human subject expresses a protein encoded by an HLA-A02:01 allele, the epitope sequence is SPSVSQLSVL (SEQ ID NO: 6139) and the human subject expresses a protein encoded by an HLA-B07:02 allele, the epitope sequence is SPYLGQMINL (SEQ ID NO: 6138) and the human subject expresses a protein encoded by an HLA-B07:02 allele, the epitope sequence is TSPRRLVEL (SEQ ID NO: 6159) and the human subject expresses a protein encoded by an HLA-C01:02 allele, the epitope sequence is VLYPVPLESY (SEQ ID NO: 6154) and the human subject expresses a protein encoded by an HLA-A03:01 allele, the epitope sequence is VSPEPLQAL (SEQ ID NO: 6156) and the human subject expresses a protein encoded by an HLA-C01:02 allele, the epitope sequence is YLHARLREL (SEQ ID NO:6157) and the human subject expresses a protein encoded by an HLA-B08:01 allele, or the epitope sequence is RLDQLLRHV (SEQ ID NO:6104) and the human subject expresses a protein encoded by an HLA-A02:01 allele.

[0108] In some embodiments, the protein comprises MAGE4: and wherein the cancer comprises squamous cell lung cancer. In some embodiments, the epitope sequence is EVDPASNTY (SEQ ID NO: 4638) and the human subject expresses a protein encoded by an HLA-A01:01 allele, the epitope sequence is GVYDGREHTV (SEQ ID NO: 4653) and the human subject expresses a protein encoded by an HLA-A02:01 allele, the epitope sequence is KEVDPASNTY (SEQ ID NO: 4640) and the human subject expresses a protein encoded by an HLA-A01:01 allele, the epitope sequence is KVDELAHFL (SEQ ID NO: 4648) and the human subject expresses a protein encoded by an HLA-A02:01 allele, the epitope sequence is QIFPKTGL (SEQ ID NO: 4692) and the human subject expresses a protein encoded by an HLA-B08:01 allele, the epitope sequence is QSPQGASAL (SEQ ID NO: 4707) and the human subject expresses a protein encoded by an HLA-C01:02 allele, the epitope sequence is SALPTTISF (SEQ ID NO: 4699) and the human subject expresses a protein encoded by an HLA-B46:01 allele, the epitope sequence is TVYGEPRKL (SEQ ID NO: 4722) and the human subject expresses a protein encoded by an HLA-C07:01 allele, the epitope sequence is VYGEPRKL (SEQ ID NO: 4727) and the human subject expresses a protein encoded by an HLA-C07:02 allele, the epitope sequence is YPSLREAAL (SEQ ID NO: 4689) and the human subject expresses a protein encoded by an HLA-B07:02 allele, the epitope sequence is ALLEEEEGV (SEQ ID NO: 4698) and the human subject expresses a protein encoded by an HLA-A02:01 allele, or the epitope sequence is KVLEHVVRV (SEQ ID NO: 4697) and the human subject expresses a protein encoded by an HLA-A02:01 allele.

[0109] Provided herein is a method comprising (a) contacting a T cell with an antigen peptide in complex with an HLA of an APC; and (b) determining a sequence of a TCR of the T cell that recognizes the antigen peptide in complex with the HLA, wherein the T cell is suspected to have zero or reduced immune tolerance to a tissue of origin of the antigen peptide. In some embodiments, the T cell is from a female subject, and the antigen peptide is specific to a tissue selected from the group consisting of: Bulbourethral gland, epididymis, penis, prostate, scrotum, seminal vesicle, testicle. In some embodiments, the T cell is from a female subject, and the antigen peptide is specific to prostate. In some embodiments, the T cell is from a male subject, and the antigen peptide is specific to a tissue selected from the group consisting of: Bartholin's gland, fallopian tube, ovary, Skene's gland, uterus, cervix, vagina, and any combination thereof. In some embodiments, the T cell is from a male subject, and the antigen peptide is specific to ovary. In some embodiments, the T cell is from a Type I diabetes patient, and the antigen peptide is specific to pancreas. In some embodiments, the T cell is from a subject that has auto-immune thyroid condition, and the antigen peptide is specific to thyroid. In some embodiments, the T cell is from a subject that is negative for an allele of the HLA. The In some embodiments, the T cell is from a subject that is negative for an allele of the HLA and the antigen peptide binds to the HLA encoded by the allele of the HLA

### INCORPORATION BY REFERENCE

[0110] All publications, patents, and patent applications mentioned in this specification are herein incorporated by reference to the same extent as if each individual publication, patent, or patent application was specifically and individually indicated to be incorporated by reference.

### BRIEF DESCRIPTION OF THE DRAWINGS

[0111] FIG. 1 is a boxplot illustrating expression levels of gene ANKRD30A in a number of different normal tissues and tumors.

[0112] FIG. 2 is a boxplot illustrating expression levels of gene COL10A1 in a number of different normal tissues and tumors.

[0113] FIG. 3 is a boxplot illustrating expression levels of gene CTCFL in a number of different normal tissues and tumors.

[0114] FIG. 4 is a boxplot illustrating expression levels of gene PPIAL4G in a number of different normal tissues and tumors.

[0115] FIG. 5 is a boxplot illustrating expression levels of gene POTEE in a number of different normal tissues and tumors.

[0116] FIG. 6 is a boxplot illustrating expression levels of gene DLL3 in a number of different normal tissues and tumors.

[0117] FIG. 7 is a boxplot illustrating expression levels of gene MMP13 in a number of different normal tissues and tumors.

[0118] FIG. 8 is a boxplot illustrating expression levels of gene SSX1 in a number of different normal tissues and tumors.

[0119] FIG. 9 is a boxplot illustrating expression levels of gene DCAF4L2 in a number of different normal tissues and tumors.

[0120] FIG. 10 is a boxplot illustrating expression levels of gene MAGEA4 in a number of different normal tissues and tumors.

[0121] FIG. 11 is a boxplot illustrating expression levels of gene MAGEA11 in a number of different normal tissues and tumors.

[0122] FIG. 12 is a boxplot illustrating expression levels of gene MAGEC2 in a number of different normal tissues and tumors.

[0123] FIG. 13 is a boxplot illustrating expression levels of gene MAGEA12 in a number of different normal tissues and tumors.

[0124] FIG. 14 is a boxplot illustrating expression levels of gene PRAME in a number of different normal tissues and tumors.

[0125] FIG. 15 is a boxplot illustrating expression levels of gene CLDN6 in a number of different normal tissues and tumors.

[0126] FIG. 16 is a boxplot illustrating expression levels of gene EPYC in a number of different normal tissues and tumors.

[0127] FIG. 17 is a boxplot illustrating expression levels of gene KLK3 in a number of different normal tissues and tumors.

[0128] FIG. 18 is a boxplot illustrating expression levels of gene KLK2 in a number of different normal tissues and tumors.

[0129] FIG. 19 is a boxplot illustrating expression levels of gene KLK4 in a number of different normal tissues and tumors.

[0130] FIG. 20 is a boxplot illustrating expression levels of gene TGM4 in a number of different normal tissues and tumors.

[0131] FIG. 21 is a boxplot illustrating expression levels of gene POTEG in a number of different normal tissues and tumors.

[0132] FIG. 22 is a boxplot illustrating expression levels of gene RLN1 in a number of different normal tissues and tumors.

[0133] FIG. 23 is a boxplot illustrating expression levels of gene POTEH in a number of different normal tissues and tumors.

[0134] FIG. 24 is a boxplot illustrating expression levels of gene SLC45A2 in a number of different normal tissues and tumors.

[0135] FIG. 25 is a boxplot illustrating expression levels of gene TSPAN10 in a number of different normal tissues and tumors.

[0136] FIG. 26 is a boxplot illustrating expression levels of gene PAGE5 in a number of different normal tissues and tumors.

[0137] FIG. 27 is a boxplot illustrating expression levels of gene CSAG1 in a number of different normal tissues and tumors.

[0138] FIG. 28 is a boxplot illustrating expression levels of gene PRDM7 in a number of different normal tissues and tumors.

[0139] FIG. 29 is a boxplot illustrating expression levels of gene TG in a number of different normal tissues and tumors.

[0140] FIG. 30 is a boxplot illustrating expression levels of gene TSHR in a number of different normal tissues and tumors.

[0141] FIG. 31 is a boxplot illustrating expression levels of gene RSPH6A in a number of different normal tissues and tumors.

[0142] FIG. 32 is a boxplot illustrating expression levels of gene SCXB in a number of different normal tissues and tumors.

[0143] FIG. 33 is a boxplot illustrating expression levels of gene HIST1H4K in a number of different normal tissues and tumors.

[0144] FIG. 34 is a boxplot illustrating expression levels of gene ALPPL2 in a number of different normal tissues and tumors.

[0145] FIG. 35 is a boxplot illustrating expression levels of gene PRM2 in a number of different normal tissues and tumors.

[0146] FIG. 36 is a boxplot illustrating expression levels of gene PRM1 in a number of different normal tissues and tumors.

[0147] FIG. 37 is a boxplot illustrating expression levels of gene TNP1 in a number of different normal tissues and tumors.

[0148] FIG. 38 is a boxplot illustrating expression levels of gene LELP1 in a number of different normal tissues and tumors.

[0149] FIG. 39 is a boxplot illustrating expression levels of gene HMGB4 in a number of different normal tissues and tumors.

[0150] FIG. 40 is a boxplot illustrating expression levels of gene AKAP4 in a number of different normal tissues and tumors.

[0151] FIG. 41 is a boxplot illustrating expression levels of gene CETN1 in a number of different normal tissues and tumors.

[0152] FIG. 42 is a boxplot illustrating expression levels of gene UBQLN3 in a number of different normal tissues and tumors.

[0153] FIG. 43 is a boxplot illustrating expression levels of gene ACTL7A in a number of different normal tissues and tumors.

[0154] FIG. 44 is a boxplot illustrating expression levels of gene ACTL9 in a number of different normal tissues and tumors.

[0155] FIG. 45 is a boxplot illustrating expression levels of gene ACTRT2 in a number of different normal tissues and tumors.

[0156] FIG. 46 is a boxplot illustrating expression levels of gene PGK2 in a number of different normal tissues and tumors.

[0157] FIG. 47 is a boxplot illustrating expression levels of gene C2orf53 in a number of different normal tissues and tumors.

[0158] FIG. 48 is a boxplot illustrating expression levels of gene KIF2B in a number of different normal tissues and tumors.

[0159] FIG. 49 is a boxplot illustrating expression levels of gene ADAD1 in a number of different normal tissues and tumors.

[0160] FIG. 50 is a boxplot illustrating expression levels of gene SPATA8 in a number of different normal tissues and tumors.

[0161] FIG. 51 is a boxplot illustrating expression levels of gene CCDC70 in a number of different normal tissues and tumors.

[0162] FIG. 52 is a boxplot illustrating expression levels of gene TPD52L3 in a number of different normal tissues and tumors.

[0163] FIG. 53 is a boxplot illustrating expression levels of gene ACTL7B in a number of different normal tissues and tumors.

[0164] FIG. 54 is a boxplot illustrating expression levels of gene DMRTB1 in a number of different normal tissues and tumors.

[0165] FIG. 55 is a boxplot illustrating expression levels of gene SYCN in a number of different normal tissues and tumors.

[0166] FIG. 56 is a boxplot illustrating expression levels of gene CELA2A in a number of different normal tissues and tumors.

[0167] FIG. 57 is a boxplot illustrating expression levels of gene CELA2B in a number of different normal tissues and tumors.

[0168] FIG. 58 is a boxplot illustrating expression levels of gene PNLIPRP1 in a number of different normal tissues and tumors.

[0169] FIG. 59 is a boxplot illustrating expression levels of gene CTRC in a number of different normal tissues and tumors.

[0170] FIG. 60 is a boxplot illustrating expression levels of gene AMY2A in a number of different normal tissues and tumors.

[0171] FIG. 61 is a boxplot illustrating expression levels of gene SERPINI2 in a number of different normal tissues and tumors.

[0172] FIG. 62 is a boxplot illustrating expression levels of gene RBPJL in a number of different normal tissues and tumors.

[0173] FIG. 63 is a boxplot illustrating expression levels of gene AQP12A in a number of different normal tissues and tumors.

[0174] FIG. 64 is a boxplot illustrating expression levels of gene IAPP in a number of different normal tissues and tumors.

[0175] FIG. 65 is a boxplot illustrating expression levels of gene KIRREL2 in a number of different normal tissues and tumors.

[0176] FIG. 66 is a boxplot illustrating expression levels of gene G6PC2 in a number of different normal tissues and tumors.

[0177] FIG. 67 is a boxplot illustrating expression levels of gene AQP12B in a number of different normal tissues and tumors.

[0178] FIG. 68 is a boxplot illustrating expression levels of gene CYP11B1 in a number of different normal tissues and tumors.

[0179] FIG. 69 is a boxplot illustrating expression levels of gene CYP11B2 in a number of different normal tissues and tumors.

[0180] FIG. 70 is a boxplot illustrating expression levels of gene STAR in a number of different normal tissues and tumors.

[0181] FIG. 71 is a boxplot illustrating expression levels of gene CYP11A1 in a number of different normal tissues and tumors.

[0182] FIG. 72 is a boxplot illustrating expression levels of gene MC2R in a number of different normal tissues and tumors.

[0183] FIG. 73 shows a schematic of an exemplary workflow for epitope mapping using targeted proteomics. FIG. 73 discloses SEQ ID NO: 8970.

[0184] FIG. 74 depicts exemplary, graphs demonstrating spectral validation of class I HLA epitopes by mass spectrometry of endogenous peptides using targeted proteomics. Chromatographs of 6 characteristic fragment ions for the light (endogenous) (“HPEYNRPLL” disclosed as SEQ ID NO: 4143) and heavy isotope-labeled synthetic peptide sequence “HPEYNRPLL (SEQ ID NO: 8969)” derived from KLK4 (HLA*B-07:02, where the endogenous peptide was identified in a human prostate specimen) are shown. Matched chromatography retention times and a high dot product similarity score (0.992, calculated using Skyline software) of peptide fragment ions provide validation that this epitope is processed and presented on the HLA-B*07:02 molecule.

[0185] FIG. 75 depicts two exemplary spectrums showing spectral validation of endogenous peptides using targeted proteomics. Spectrum for the light (endogenous) HPEYNRPLL (SEQ ID NO: 4143) epitope identified on a human prostate specimen (left) and the corresponding heavy isotope-labeled synthetic peptide (right) (“HPEYNRPLL” disclosed as SEQ ID NO: 8969) are shown. B and Y fragment ions are shown, and display high spectral similarity, confirming detection of the endogenous epitope. For each peptide, the top 200 more intense ions were plotted, and corresponding mass error of highlighted b and y ions are plotted below spectrum plots.

[0186] FIG. 76 depicts exemplary flow cytometry plots of peptide-MHC multimer staining of target epitopes after naive T cell inductions in healthy donors with the indicated HLA-I molecules. Multimer positive populations and the percentage of multimer positive cells is shown. The top panel displays positive sample identifications using a combinatorial multimer analysis. The bottom panel displays results from a confirmation combinatorial analysis performed on frozen samples following the initial identification from the top panel. Multimer positive cells from analyses in the bottom panel are sorted for downstream TCR identification. FIG. 76 discloses SEQ ID NOS 4143, 3757 and 6095, respectively, in order of appearance.

[0187] FIG. 77 depicts graphs showing exemplary TCR clonotypes identified from the 10× genomics pipeline. Each graph originated from a single sorted, multimer positive, population. The samples in this case all contained two unique TCR clonotypes, identified by a paired alpha and beta sequence. In the case where the 10× genomics pipeline identified a clonotype that contained multiple of either alpha or beta sequences, all possible combinations were synthesized for antigen specificity and avidity.

[0188] FIG. 78 depicts exemplary plots showing avidity of exemplary TCRs. The plots reflect the CD69 expression on transduced Jurkat cells (identified by the co-expression of murine TCR, CD8, and CD3) following an overnight coculture with a target cell line presenting the HLA and loaded with a variable amount of peptide. Of the seven TCRs tested, five of them show increased expression of CD69 in a peptide dependent manner. The concentration required to achieve a 50% activation (EC50) is calculated from these plots and the results are shown on the plot. Target cells were previously transduced to overexpress the allele of interest. A375s were plated at 50K/well 2-5 hours prior to pulsing with peptide for 1 hour prior to the addition of effector cells. T2s were plated at 10K/well prior to pulsing with peptide for 1 hour prior to the addition of effector cells. Peptide was pulsed with a final concentration between 10e3 and 10e-1 nM. The cells were co-cultured overnight before harvest and staining for CD69 expression via flow using a CD8, CD3, and murine TCR constant antibodies as lineage markers for effector cells.

[0189] FIG. 79 depicts exemplary plots showing endogenous activity of two different exemplary TcRs. avidity of exemplary TcRs, the plots here reflect the activation of two different TCR sequences (hereafter named mTCR21-033 and mTCR-034) following a coculture with the cell line mDA-PCa-2b which is endogenous for both HLA-B07 and KLK4. These plots are showing an increase in activation of mTCR21-033, but not mTCR21-034 following a 24-hour treatment with a cocktail of interferons (IFN). The IFN treatment increases the expression of surface HLA on cell lines, and the increased surface expression of the HLA can provide more expression of HLA-B07 bound to the KLK4 epitope, mDA-PCa-2b cells were plated at 50K/well in F12K media. The next day the cultures were treated with a cocktail of interferon alpha, beta, and gamma all at 1 U/μL final concentration. The next day the cells were washed with RPMI supplemented with 10% FBS and Glutamax. The cultures were then pulsed with peptide at a final concentration of 2 μM for 1 hour before the addition of effector cells. The cells were co-cultured overnight before harvest and staining for CD69 expression via flow using a CD8, CD3, and murine TCR constant antibodies as lineage markers for effector cells and HLA-B07 as a lineage marker for the target cells.

### DETAILED DESCRIPTION

### Definitions

[0190] The terminology used herein is for the purpose of describing particular cases only and is not intended to be limiting. In this application, the use of the singular includes the plural unless specifically stated otherwise. As used herein, the singular forms “a”, “an” and “the” are intended to include the plural forms as well, unless the context clearly indicates otherwise.

[0191] In this application, the use of “or” means “and/or” unless stated otherwise. The terms “and/or” and “any combination thereof” and their grammatical equivalents as used herein, can be used interchangeably. These terms can convey that any combination is specifically contemplated. Solely for illustrative purposes, the following phrases “A, B, and/or C” or “A, B, C, or any combination thereof” can mean “A individually; B individually: C individually; A and B; B and C; A and C; and A, B, and C.” The term “or” can be used conjunctively or disjunctively, unless the context specifically refers to a disjunctive use.

[0192] The term “about” or “approximately” can mean within an acceptable error range for the particular value as determined by one of ordinary skill in the art, which will depend in part on how the value is measured or determined, i.e., the limitations of the measurement system. For example. “about” can mean within 1 or more than 1 standard deviation, per the practice in the art. Alternatively, “about” can mean a range of up to 20%, up to 10%, up to 5%, or up to 1% of a given value. Alternatively, particularly with respect to biological systems or processes, the term can mean within an order of magnitude, within 5-fold, and more preferably within 2-fold, of a value. Where particular values are described in the application and claims, unless otherwise stated the term “about” meaning within an acceptable error range for the particular value should be assumed.

[0193] As used in this specification and claim(s), the words “comprising” (and any form of comprising, such as “comprise” and “comprises”), “having” (and any form of having, such as “have” and “has”), “including” (and any form of including, such as “includes” and “include”) or “containing” (and any form of containing, such as “contains” and “contain”) are inclusive or open-ended and do not exclude additional, unrecited elements or method steps. It is contemplated that any embodiment discussed in this specification can be implemented with respect to any method or composition of the present disclosure, and vice versa. Furthermore, compositions of the present disclosure can be used to achieve methods of the present disclosure.

[0194] Reference in the specification to “some embodiments,” “an embodiment,” “one embodiment” or “other embodiments” can mean that a particular feature, structure, or characteristic described in connection with the embodiments is included in at least some embodiments, but not necessarily all embodiments, of the present disclosures. To facilitate an understanding of the present disclosure, a number of terms and phrases are defined below.

[0195] “Major Histocompatibility Complex” or “MHC” can refer to a cluster of genes that plays a role in control of the cellular interactions responsible for physiologic immune responses. In humans, the MHC complex is also known as the human leukocyte antigen (HLA) complex. For a detailed description of the MHC and HLA complexes, see, Paul, Fundamental Immunology, 3^{rd} Ed., Raven Press, New York (1993). “Proteins or molecules of the major histocompatibility complex (MHC)”, “MHC molecules”, “MHC proteins” or “HLA proteins” are to be understood as meaning proteins capable of binding peptides resulting from the proteolytic cleavage of protein antigens transporting them to the cell surface and presenting them there to specific cells, in particular cytotoxic T-lymphocytes, T-helper cells, or B cells. The major histocompatibility complex in the genome comprises the genetic region whose gene products expressed on the cell surface are important for binding and presenting endogenous and/or foreign antigens and thus for regulating immunological processes. The major histocompatibility complex is classified into two gene groups coding for different proteins, namely molecules of MHC class I and molecules of MHC class II. The cellular biology and the expression patterns of the two MHC classes are adapted to these different roles.

[0196] “Human Leukocyte Antigen” or “HLA” can refer to a human class I or class II Major Histocompatibility Complex (MHC) protein (see, e.g., Stites, et al., Immunology, 8^{th} Ed., Lange Publishing, Los Altos, Calif. (1994).

[0197] “Polypeptide” and “peptide” are used interchangeably and as used herein can refer to a polymer of amino acid residues. A “mature protein” is a protein which is full-length and which, optionally, includes glycosylation or other modifications typical for the protein in a given cellular environment. Polypeptides and proteins disclosed herein (including functional portions and functional variants thereof) can comprise synthetic amino acids in place of one or more naturally-occurring amino acids. Such synthetic amino acids are known in the art, and include, for example, aminocyclohexane carboxylic acid, norleucine, α-amino n-decanoic acid, homoserine, S-acetylaminomethyl-cysteine, trans-3- and trans-4-hydroxyproline, 4-aminophenylalanine, 4-nitrophenylalanine, 4-chlorophenylalanine, 4-carboxyphenylalanine, β-phenylserine β-hydroxyphenylalanine, phenylglycine, α-naphthylalanine, cyclohexylalanine, cyclohexylglycine, indoline-2-carboxylic acid, 1,2,3,4-tetrahydroisoquinoline-3-carboxylic acid, aminomalonic acid, aminomalonic acid monoamide, N′-benzyl-N′-methyl-lysine, N′,N′-dibenzyl-lysine, 6-hydroxylysine, ornithine, α-aminocyclopentane carboxylic acid, α-aminocyclohexane carboxylic acid, α-aminocycloheptane carboxylic acid, α-(2-amino-2-norbornane)-carboxylic acid, α,γ-diaminobutyric acid, α,β-diaminopropionic acid, homophenylalanine, and α-tert-butylglycine. The present disclosure further contemplates that expression of polypeptides described herein in an engineered cell can be associated with post-translational modifications of one or more amino acids of the polypeptide constructs. Non-limiting examples of post-translational modifications include phosphorylation, acylation including acetylation and formylation, glycosylation (including N-linked and O-linked), amidation, hydroxylation, alkylation including methylation and ethylation, ubiquitination, addition of pyrrolidone carboxylic acid, formation of disulfide bridges, sulfation, myristoylation, palmitoylation, isoprenylation, farnesylation, geranylation, glypiation, lipoylation and iodination. The nomenclature used to describe peptides or proteins follows the conventional practice wherein the amino group is presented to the left (the amino- or N-terminus) and the carboxyl group to the right (the carboxy- or C-terminus) of each amino acid residue. When amino acid residue positions are referred to in a peptide epitope they are numbered in an amino to carboxyl direction with position one being the residue located at the amino terminal end of the epitope, or the peptide or protein of which it can be a part. In the formula representing selected specific embodiments of the present disclosure, the amino- and carboxyl-terminal groups, although not specifically shown, are in the form they would assume at physiologic pH values, unless otherwise specified. In the amino acid structure formula, each residue is generally represented by standard three letter or single letter designations. The L-form of an amino acid residue is represented by a capital single letter or a capital first letter of a three-letter symbol, and the D-form for those amino acid residues having D-forms is represented by a lower case single letter or a lower case three letter symbol. However, when three letter symbols or full names are used without capitals, they can refer to L amino acid residues. Glycine has no asymmetric carbon atom and is simply referred to as “Gly” or “G”. The amino acid sequences of peptides set forth herein are generally designated using the standard single letter symbol. (A, Alanine; C. Cysteine; D, Aspartic Acid; E, Glutamic Acid; F, Phenylalanine; G, Glycine; H, Histidine: I, Isoleucine; K, Lysine: L, Leucine; M, Methionine; N, Asparagine; P, Proline; Q, Glutamine; R, Arginine; S, Serine: T, Threonine: V, Valine; W. Tryptophan; and Y, Tyrosine.)

[0198] An “immunogenic” peptide or an “immunogenic” epitope can refer to a peptide or a peptide containing an epitope that comprises an allele-specific motif such that the peptide will bind an HLA molecule and induce a cell-mediated or humoral response, for example, cytotoxic T lymphocyte (CTL (e.g., CD8+)), helper T lymphocyte (Th (e.g., CD4*)) and/or B lymphocyte response. Thus, immunogenic peptides described herein are capable of binding to an appropriate HLA molecule and thereafter inducing a CTL (cytotoxic) response, or a HTL (and humoral) response, to the peptide.

[0199] A “reference” can be used to correlate and compare the results obtained in the methods of the present disclosure from a tumor specimen. Typically the “reference” may be obtained on the basis of one or more normal specimens, in particular specimens which are not affected by a cancer disease, either obtained from a patient or one or more different individuals, for example, healthy individuals, in particular individuals of the same species. A “reference” can be determined empirically by testing a sufficiently large number of normal specimens.

[0200] An “epitope” can be the collective features of a molecule, such as primary, secondary and tertiary peptide structure, and charge, that together form a site recognized by, for example, an immunoglobulin, T cell receptor, HLA molecule, or chimeric antigen receptor. Alternatively, an epitope can be defined as a set of amino acid residues which is involved in recognition by a particular immunoglobulin, or in the context of T cells, those residues necessary for recognition by T cell receptor proteins, chimeric antigen receptors, and/or Major Histocompatibility Complex (MHC) receptors. Epitopes can be prepared by isolation from a natural source, or they can be synthesized according to standard protocols in the art. Synthetic epitopes can comprise artificial amino acid residues, “amino acid mimetics,” such as D isomers of naturally-occurring L amino acid residues or non-naturally-occurring amino acid residues such as cyclohexylalanine. Throughout this disclosure, epitopes may be referred to in some cases as peptides or peptide epitopes. It is to be appreciated that proteins or peptides that comprise an epitope or an analog described herein as well as additional amino acid(s) are still within the bounds of the present disclosure. In certain embodiments, the peptide comprises a fragment of an antigen. In certain embodiments, there is a limitation on the length of a peptide of the present disclosure. The embodiment that is length-limited occurs when the protein or peptide comprising an epitope described herein comprises a region (i.e., a contiguous series of amino acid residues) having 100% identity with a native sequence. In order to avoid the definition of epitope from reading, e.g., on whole natural molecules, there is a limitation on the length of any region that has 100% identity with a native peptide sequence. Thus, for a peptide comprising an epitope described herein and a region with 100% identity with a native peptide sequence, the region with 100% identity to a native sequence generally has a length of: less than or equal to 600 amino acid residues, less than or equal to 500 amino acid residues, less than or equal to 400 amino acid residues, less than or equal to 250 amino acid residues, less than or equal to 100 amino acid residues, less than or equal to 85 amino acid residues, less than or equal to 75 amino acid residues, less than or equal to 65 amino acid residues, and less than or equal to 50 amino acid residues. In certain embodiments, an “epitope” described herein is comprised by a peptide having a region with less than 51 amino acid residues that has 100% identity to a native peptide sequence, in any increment down to 5 amino acid residues; for example 50, 49, 48, 47, 46, 45, 44, 43, 42, 41, 40, 39, 38, 37, 36, 35, 34, 33, 32, 31, 30, 29, 28, 27, 26, 25, 24, 23, 22, 21, 20, 19, 18, 17, 16, 15, 14, 13, 12, 11, 10, 9, 8, 7, 6, 5, 4, 3, 2 or 1 amino acid residues.

[0201] A “T cell epitope” is to be understood as meaning a peptide sequence which can be bound by the MHC molecules of class I or II in the form of a peptide-presenting MHC molecule or MHC complex and then, in this form, be recognized and bound by T cells, such as T-lymphocytes or T-helper cells.

[0202] As used herein, the term “affinity” can refer to a measure of the strength of binding between two members of a binding pair, for example, an HLA-binding peptide and a class I or II HLA. Kr is the dissociation constant and has units of molarity. The affinity constant is the inverse of the dissociation constant. An affinity constant is sometimes used as a generic term to describe this chemical entity. It is a direct measure of the energy of binding. Affinity may be determined experimentally, for example by surface plasmon resonance (SPR) using commercially available Biacore SPR units. Affinity may also be expressed as the inhibitory concentration 50 (IC₅₀), that concentration at which 50% of the peptide is displaced. Likewise, In(IC₅₀) refers to the natural log of the IC₅₀. K_{off} refers to the off-rate constant, for example, for dissociation of an HLA-binding peptide and a class I or 11 HLA. Throughout this disclosure, “binding data” results can be expressed in terms of “IC₅₀.” IC₅₀ is the concentration of the tested peptide in a binding assay at which 50% inhibition of binding of a labeled reference peptide is observed. Given the conditions in which the assays are run (i.e., limiting HLA protein and labeled reference peptide concentrations), these values approximate K_{D} values. Assays for determining binding are well known in the art and are described in detail, for example, in PCT publications WO 94/20127 and WO 94/03205, and other publications such Sidney et al., Current Protocols in Immunology 18.3.1 (1998); Sidney, et al., J. Immunol. 154:247 (1995): and Sette, et al., Mol. Immunol. 31:813 (1994). Alternatively, binding can be expressed relative to binding by a reference standard peptide. For example, can be based on its IC₅₀, relative to the IC % of a reference standard peptide. Binding can also be determined using other assay systems including those using: live cells (e.g., Ceppellini et al., Nature 339:392 (1989); Christnick et al., Nature 352:67 (1991); Busch et al., Int. Immunol. 2:443 (1990); Hill et al., J. Immunol. 147:189 (1991); del Guercio et al., J. Immunol. 154:685 (1995)), cell free systems using detergent lysates (e.g., Cerundolo et al., J. Immunol. 21:2069 (1991)), immobilized purified MHC (e.g., Hill et al., J. Immunol. 152, 2890 (1994); Marshall et al., J. Immunol. 152:4946 (1994)), ELISA systems (e.g., Reay et al., EMBO J. 11:2829 (1992)), surface plasmon resonance (e.g., Khilko et al., J. Biol. Chem. 268:15425 (1993)): high flux soluble phase assays (Hammer et al., J. Exp. Med. 180:2353 (1994)), and measurement of class I MHC stabilization or assembly (e.g., Ljunggren et al., Nature 346:476 (1990); Schumacher et al., Cell 62:563 (1990); Townsend et al., Cell 62:285 (1990); Parker et al., J. Immunol. 149:1896 (1992)). “Cross-reactive binding” indicates that a peptide is bound by more than one HLA molecule: a synonym is degenerate binding.

[0203] “Synthetic peptide” can refer to a peptide that is obtained from a non-natural source, e.g., is man-made. Such peptides can be produced using such methods as chemical synthesis or recombinant DNA technology. In some embodiments, “Synthetic peptides” may include “fusion proteins.”

[0204] The term “motif” can refer to a pattern of residues in an amino acid sequence of defined length, for example, a peptide of less than about 15 amino acid residues in length, or less than about 13 amino acid residues in length, for example, from about 8 to about 13 amino acid residues (e.g., 8, 9, 10, 11, 12, or 13) for a class I HLA motif and from about 6 to about 25 amino acid residues (e.g., 6, 7, 8, 9, 10, 11, 12, 13, 14, 15, 16, 17, 18, 19, 20, 21, 22, 23, 24, or 25) for a class II HLA motif, which is recognized by a particular HLA molecule. Motifs are typically different for each HLA protein encoded by a given human HLA allele. These motifs differ in their pattern of the primary and secondary anchor residues. In some embodiments, an MHC class I motif identifies a peptide of 9, 10, or 11 amino acid residues in length.

[0205] According to the present disclosure, the term “vaccine” can relate to a pharmaceutical preparation (pharmaceutical composition) or product that upon administration induces an immune response, for example, a cellular or humoral immune response, which recognizes and attacks a pathogen or a diseased cell such as a cancer cell. A vaccine may be used for the prevention or treatment of a disease. The term “individualized cancer vaccine” or “personalized cancer vaccine” concerns a particular cancer patient and means that a cancer vaccine is adapted to the needs or special circumstances of an individual cancer patient.

[0206] A“protective immune response” or “therapeutic immune response” can refer to a CTL and/or an HTL response to an antigen derived from an pathogenic antigen (e.g., a tissue-specific antigen), which in some way prevents or at least partially arrests disease symptoms, side effects or progression. The immune response can also include an antibody response which has been facilitated by the stimulation of helper T cells.

[0207] The term “antibody” as used herein, can refer to an immunoglobulin protein comprising two heavy chains, bound to each other, wherein each heavy chain can also be paired with a light chain.

[0208] A “functional part of an antibody” as used herein can refer to a part that has at least one shared property as said antibody in kind, not necessarily in amount. The functional part is capable of binding the same antigen as the antibody, albeit not necessarily to the same extent. A functional part of an antibody preferably comprises at least a heavy chain variable domain (Vi) and a light chain variable domain (V). In some embodiments, a functional part of an antibody comprises at least a heavy chain variable domain (V_{H}). Non-limiting examples of a functional part of an antibody can be a single domain antibody, a single chain antibody, a nanobody, an unibody, a single chain variable fragment (scFv), a bi-specific T-cell engager (BiTE), a Fab fragment and a F(ab′)₂ fragment.

[0209] “Antigen processing” or “processing” and its grammatical equivalents can refer to the degradation of a polypeptide or antigen into procession products, which are fragments of said polypeptide or antigen (e.g., the degradation of a polypeptide into peptides) and the association of one or more of these fragments (e.g., via binding) with MHC molecules for presentation by cells, for example, antigen presenting cells, to specific T cells.

[0210] “Antigen presenting cells” (APC) can be cells which present peptide fragments of protein antigens in association with MHC molecules on their cell surface. Some APCs may activate antigen specific T cells. Professional antigen-presenting cells are very efficient at internalizing antigen, either by phagocytosis or by receptor-mediated endocytosis, and then displaying a fragment of the antigen, bound to a class II MHC molecule, on their membrane. The T cell recognizes and interacts with the antigen-class II MHC molecule complex on the membrane of the antigen presenting cell. An additional co-stimulatory signal is then produced by the antigen presenting cell, leading to activation of the T cell. The expression of co-stimulatory molecules is a defining feature of professional antigen-presenting cells. The main types of professional antigen-presenting cells are dendritic cells, which have the broadest range of antigen presentation, and are probably the most important antigen presenting cells, macrophages, B-cells, and certain activated epithelial cells. Dendritic cells (DCs) are leukocyte populations that present antigens captured in peripheral tissues to T cells via both MHC class II and I antigen presentation pathways. It is well known that dendritic cells are potent inducers of immune responses and the activation of these cells is a critical step for the induction of antitumoral immunity. Dendritic cells are conveniently categorized as “immature” and “mature” cells, which can be used as a simple way to discriminate between two well characterized phenotypes. However, this nomenclature should not be construed to exclude all possible intermediate stages of differentiation. Immature dendritic cells are characterized as antigen presenting cells with a high capacity for antigen uptake and processing, which correlates with the high expression of Fc receptor (FcR) and mannose receptor. The mature phenotype is typically characterized by a lower expression of these markers, but a high expression of cell surface molecules responsible for T cell activation such as class I and class II MHC, adhesion molecules (e.g., CD54 and CD11) and costimulatory molecules (e.g., CD40, CD80, CD86 and 4-1 BB).

[0211] The terms “identical” and its grammatical equivalents as used herein or “sequence identity” in the context of two nucleic acid sequences or amino acid sequences of polypeptides can refer to the residues in the two sequences which are the same when aligned for maximum correspondence over a specified comparison window. A “comparison window”, as used herein, can refer to a segment of at least about 20 contiguous positions, usually about 50 to about 200, more usually about 100 to about 150 in which a sequence may be compared to a reference sequence of the same number of contiguous positions after the two sequences are aligned optimally. Methods of alignment of sequences for comparison are well-known in the art. Optimal alignment of sequences for comparison may be conducted by the local homology algorithm of Smith and Waterman, Adv. Appl. Math., 2:482 (1981); by the alignment algorithm of Needleman and Wunsch, J. Mol. Biol., 48:443 (1970); by the search for similarity method of Pearson and Lipman, Proc. Nat. Acad. Sci. U.S.A., 85:2444 (1988); by computerized implementations of these algorithms (including, but not limited to CLUSTAL in the PC/Gene program by Intelligentics, Mountain View Calif., GAP, BESTFIT, BLAST, FASTA, and TFASTA in the Wisconsin Genetics Software Package, Genetics Computer Group (GCG), 575 Science Dr., Madison, Wis., U.S.A.); the CLUSTAL program is well described by Higgins and Sharp, Gene, 73:237-244 (1988) and Higgins and Sharp, CABIOS, 5:151-153 (1989); Corpet et al., Nucleic Acids Res., 16:10881-10890 (1988); Huang et al., Computer Applications in the Biosciences, 8:155-165 (1992); and Pearson et al., Methods in Molecular Biology, 24:307-331 (1994). Alignment is also often performed by inspection and manual alignment. In one class of embodiments, the polypeptides herein have at least 60%, 61%, 62%, 63%, 64%, 65%, 66%, 67%, 68%, 69%, 70%, 71%, 72%, 73%, 74%, 75%, 76%, 77%, 78%, 79%, 80%, 81%, 82%, 83%, 84%, 85%, 86%, 87%, 88%, 89%, 90%, 91%, 92%, 93%, 94%, 95%, 96%, 97%, 98%, 99% or 100% sequence identity to a reference polypeptide, or a fragment thereof, e.g., as measured by BLASTP (or CLUSTAL, or any other available alignment software) using default parameters. Similarly, nucleic acids can also be described with reference to a starting nucleic acid, e.g., they can have 50%, 60%, 70%, 75%, 80%, 85%, 90%, 98%, 99% or 100% sequence identity to a reference nucleic acid or a fragment thereof, e.g., as measured by BLASTN (or CLUSTAL, or any other available alignment software) using default parameters. When one molecule is said to have certain percentage of sequence identity with a larger molecule, it means that when the two molecules are optimally aligned, said percentage of residues in the smaller molecule finds a match residue in the larger molecule in accordance with the order by which the two molecules are optimally aligned.

[0212] The term “substantially identical” and its grammatical equivalents as applied to nucleic acid or amino acid sequences can mean that a nucleic acid or amino acid sequence comprises a sequence that has at least 90% sequence identity or more, at least 95%, at least 98% and at least 99%, compared to a reference sequence using the programs described above, e.g., BLAST, using standard parameters. For example, the BLASTN program (for nucleotide sequences) uses as defaults a word length (W) of 11, an expectation (E) of 10, M=5, N=−4, and a comparison of both strands. For amino acid sequences, the BLASTP program uses as defaults a word length (W) of 3, an expectation (E) of 10, and the BLOSUM62 scoring matrix (see Henikoff & Henikoff, Proc. Natl. Acad. Sci. USA 89:10915 (1992)). Percentage of sequence identity is determined by comparing two optimally aligned sequences over a comparison window, wherein the portion of the polynucleotide sequence in the comparison window may comprise additions or deletions (i.e., gaps) as compared to the reference sequence (which does not comprise additions or deletions) for optimal alignment of the two sequences. The percentage is calculated by determining the number of positions at which the identical nucleic acid base or amino acid residue occurs in both sequences to yield the number of matched positions, dividing the number of matched positions by the total number of positions in the window of comparison and multiplying the result by 100 to yield the percentage of sequence identity. In embodiments, the substantial identity exists over a region of the sequences that is at least about 50 residues in length, over a region of at least about 100 residues, and in embodiments, the sequences are substantially identical over at least about 150 residues. In embodiments, the sequences are substantially identical over the entire length of the coding regions.

[0213] The term “vector” as used herein can mean a construct, which is capable of delivering, and usually expressing, one or more gene(s) or sequence(s) of interest in a host cell. Examples of vectors include, but are not limited to, viral vectors, naked DNA or RNA expression vectors, plasmid, cosmid, or phage vectors, DNA or RNA expression vectors associated with cationic condensing agents, and DNA or RNA expression vectors encapsulated in liposomes.

[0214] A polypeptide, antibody, polynucleotide, vector, cell, or composition which is “isolated” can be a polypeptide, antibody, polynucleotide, vector, cell, or composition which is in a form not found in nature. Isolated polypeptides, antibodies, polynucleotides, vectors, cells, or compositions include those which have been purified to a degree that they are no longer in a form in which they are found in nature. In some embodiments, a polypeptide, antibody, polynucleotide, vector, cell, or composition which is isolated is substantially pure. For example, isolated peptides do not contain some or all of the materials normally associated with the peptides in their in situ environment. For example, a naturally-occurring polynucleotide or peptide present in a living animal is not isolated, but the same polynucleotide or peptide, separated from some or all of the coexisting materials in the natural system, is isolated. Such a polynucleotide could be part of a vector, and/or such a polynucleotide or peptide could be part of a composition, and still be “isolated” in that such vector or composition is not part of its natural environment. Isolated RNA molecules include in vivo or in vitro RNA transcripts of the DNA molecules described herein, and further include such molecules produced synthetically.

[0215] The terms “polynucleotide”, “nucleotide”, “nucleic acid”, “polynucleic acid” or “oligonucleotide” and their grammatical equivalents arc used interchangeably herein and can refer to polymers of nucleotides of any length, and include DNA and RNA, for example, mRNA. Thus, these terms includes double and single stranded DNA, triplex DNA, as well as double and single stranded RNA. It also includes modified, for example, by methylation and/or by capping, and unmodified forms of the polynucleotide. The term is also meant to include molecules that include non-naturally occurring or synthetic nucleotides as well as nucleotide analogs. The nucleic acid sequences and vectors disclosed or contemplated herein may be introduced into a cell by, for example, transfection, transformation, or transduction. The nucleotides can be deoxyribonucleotides, ribonucleotides, modified nucleotides or bases, and/or their analogs, or any substrate that can be incorporated into a polymer by DNA or RNA polymerase. In some embodiments, the polynucleotide and nucleic acid can be in vitro transcribed mRNA. In some embodiments, the polynucleotide that is administered using the methods of the present disclosure is mRNA.

[0216] “Transfection,” “transformation,” or “transduction” as used herein can refer to the introduction of one or more exogenous polynucleotides into a host cell by using physical or chemical methods. Many transfection techniques are known in the art and include, for example, calcium phosphate DNA co-precipitation (see, e.g., Murray E. J. (ed.). Methods in Molecular Biology, Vol. 7, Gene Transfer and Expression Protocols, Humana Press (1991)); DEAE-dextran: electroporation; cationic liposome-mediated transfection; tungsten particle-facilitated microparticle bombardment (Johnston, Nature, 346: 776-777 (1990)); and strontium phosphate DNA co-precipitation (Brash et al., Mol. Cell Biol., 7: 2031-2034 (1987)). Phage or viral vectors can be introduced into host cells, after growth of infectious particles in suitable packaging cells, many of which are commercially available.

[0217] The term “subject” can refer to any animal (e.g., a mammal), including, but not limited to, humans, non-human primates, canines, felines, rodents, and the like, which is to be the recipient of a particular treatment. Typically, the terms “subject” and “patient” are used interchangeably herein in reference to a human subject.

[0218] The terms “effective amount” or “therapeutically effective amount” or “therapeutic effect” can refer to an amount of a therapeutic effective to “treat” a disease or disorder in a subject or mammal. The therapeutically effective amount of a drug has a therapeutic effect and as such can prevent the development of a disease or disorder; slow down the development of a disease or disorder; slow down the progression of a disease or disorder; relieve to some extent one or more of the symptoms associated with a disease or disorder; reduce morbidity and mortality; improve quality of life; or a combination of such effects.

[0219] The terms “treating” or “treatment” or “to treat” or “alleviating” or “to alleviate” can refer to both (1) therapeutic measures that cure, slow down, lessen symptoms of, and/or halt progression of a diagnosed pathologic condition or disorder; and (2) prophylactic or preventative measures that prevent or slow the development of a targeted pathologic condition or disorder. Thus those in need of treatment include those already with the disorder; those prone to have the disorder, and those in whom the disorder is to be prevented.

[0220] “Pharmaceutically acceptable” can refer to a generally non-toxic, inert, and/or physiologically compatible composition or component of a composition.

[0221] A “pharmaceutical excipient” or “excipient” can comprise a material such as an adjuvant, a carrier, pH-adjusting and buffering agents, tonicity adjusting agents, wetting agents, preservatives, and the like. A “pharmaceutical excipient” is an excipient which is pharmaceutically acceptable.

[0222] A “tissue-specific” antigen can refer to an epitope sequence that is encoded by a gene that has a higher expression level in a target tissue than a non-target tissue.

### Tissue-Specific Antigens

[0223] Tissue-specific antigens can have great potential as targets for immunotherapies. Among others, provided herein are tissue-specific antigens, compositions containing tissue-specific antigens or producing tissue-specific antigens, and methods of identifying tissue-specific antigens. One advantage of targeting tissue-specific antigens for immunotherapies can be that tissue-specific genes are typically expressed very highly in their given tissue, enhancing their likelihood of robust presentation. It is possible such an approach can eliminate both the tumor as well as the corresponding healthy tissue of the same lineage. However, in many cases, this can be an acceptable trade-off. For instance, CAR-T therapies targeting the CD19 surface marker eliminate both healthy B cells and leukemic B cells. While the loss of normal B cells may compromise immune function, patients are able to tolerate B cell ablation.

[0224] In some embodiments, the tissue-specific antigens are specific to non-essential tissues. The tissue-specific epitope sequence can be expected to be presented on tumor cells or non-essential normal cells from a non-essential tissue of the same lineage, and can be expected to have zero or a low expression level in essential tissues. The epitope sequence information of the tissue-specific antigens, e.g., antigens specific to a tumor from a particular tissue, can therefore be translated into therapeutic methods and compositions for diseases or conditions, e.g., cancer. In some embodiments, the tissue-specific antigens provided herein can be expressed at a high level in a tumor tissue that originates or is at a non-essential tissue. The tissue-specific antigens, in some embodiments, may or may not be expressed in a normal non-essential tissue, while they can be expressed at a relatively very low level in essential tissues.

[0225] As provided herein, a tissue-specific antigen can refer to an epitope sequence that is encoded by a gene that has a higher expression level in a target tissue than a non-target tissue, in which case, the tissue-specific antigen can be referred to as being “specific to the target tissue”. In some embodiments, a target tissue-specific antigen is from an epitope gene that has an expression level in the target tissue that is at least 1.1, at least 1.2, at least 1.3, at least 1.4, at least 1.5, at least 1.6, at least 1.7, at least 1.8, at least 1.9, at least 2, at least 2.1, at least 2.3, at least 2.4, at least 2.5, at least 2.6, at least 2.7, at least 2.8, at least 2.9, at least 3, at least 3.2, at least 3.4, at least 3.5, at least 3.6, at least 3.8, at least 4, at least 4.5, at least 5, at least 6, at least 7, at least 8, at least 9, at least 10, at least 11, at least 12, at least 13, at least 14, at least 15, at least 16, at least 17, at least 18, at least 19, at least 20, at least 22, at least 24, at least 25, at least 26, at least 28, at least 30, at least 35, at least 40, at least 45, at least 50, at least 55, at least 60, at least 70, at least 80, at least 90, at least 100, at least 120, at least 140, at least 150, at least 160, at least 180, at least 200, at least 250, at least 300, at least 400, at least 500, at least 600, at least 700, at least 800, at least 900, at least 1000, at least 2000, at least 4000, at least 5000, at least 10⁴, at least 10⁵, or at least 10⁶ folds higher than its expression level in a second tissue. In some embodiments, the tissue-specific antigen can be specific to one certain type of tissue, for example, the tissue-specific antigen can be only specific to pancreatic tissue, heart tissue, prostate tissue, or epithelial tissue. In some embodiments, the tissue-specific antigen can be specific to more than one type of tissues, for example, the tissue-specific antigen can be specific to 2, 3, 4, 5, 6, 7, 8, 9, 10, 11, 12, 13, 14, 15, or more different types of tissues. The criteria for setting “tissue specificity” can vary depending on purposes of application of the subject matter provided herein. As will be discussed in details, the subject matter provided herein can be applied to various situations where different criteria for selecting tissue-specific antigens may be utilized.

[0226] In some embodiments, the tissue-specific antigen is specific to a target tissue other than in an essential tissue. In some embodiments, the target tissue is a non-essential tissue. As provided herein, an essential tissue can refer to a tissue in a living body, whose function in the maintaining the life of the body cannot be substituted by an internal or external support. As provided herein, a non-essential tissue can refer to a tissue in a living body, whose function in the maintaining the life of the body can be substituted (e.g., function of the tissue can be at least partially performed by some other tissue in the body or performed by tissue transplant or an artificial device) or foregone (e.g., function of the tissue is not required for survival of the body). In some embodiments, an essential tissue comprises brain or colon tissue. In some embodiments, an essential tissue comprises bone marrow. In some embodiments, a non-essential tissue comprises thyroid, pancreas, adrenal, fallopian, prostate, breast, ovary, or cervical tissue.

[0227] In some aspects, the present disclosure provides tissue-specific antigens, e.g. tissue-specific antigenic peptides. The tissue-specific antigens provided herein can comprise tumor epitope sequences. The tissue-specific antigens as provided herein can comprise tumor epitope sequences from tumor expressed proteins as provided herein. In some embodiments, a tumor expressed protein as provided herein is specific to a tumor from a certain type of tissue, for example, tumor expressed protein TSHR can be specific to thyroid cancer that is from thyroid tissue.

[0228] In some embodiments, the tumor expressed proteins as provided herein comprise ACTL7A, ACTL7B, ACTL9, ACTRT2, ADAD1, AKAP4, ALPPL2, AMY2A, ANKRD30A, AQP12A, AQP12B, C2orf53, CCDC70, CELA2A, CELA2B, CETN1, CLDN6, COL10A1, CSAG1, CTCFL, CTRC, CYP11A1, CYP11B1, CYP11B2, DCAF4L2, DLL3, DMRTB1, EPYC, G6PC2, HMGB4, IAPP, KIF2B, KIRREL2, KLK2, KLK3, KLK4, LELP1, MAGEA11, MAGEA12, MAGEA2, MAGEA4, MAGEC2, MC2R, MMP13, PAGE5, PGK2, PNLIPRP1, POTEE, POTEG, POTEH, PPIAL4G, PRAME, PRDM7, PRM1, PRM2, RBPJL, RLN1, RSPH6A, SCXB, SERPINI2, SLC45A2, SPATA8, SSX1, STAR, SYCN, TG, TGM4, TNP1, TPD52L3, TSHR, TSPAN10, UBQLN3, or any combination thereof.

[0229] The tumor expressed proteins provided herein can comprise TSHR, TG, RSPH6A, SCXB, SSX1, or any combination thereof, each of which can be specific to thyroid cancer. The epitope sequence provided herein can have at least 50%, at least 60%, at least 70%, at least 80%, at least 85%, at least 90%, at least 95%, or 100% sequence identity to peptide sequence selected from the group consisting of SEQ ID NOS 6846-7061, 7359-7448, 7629-8099, and 8619-8744, each of which can be specific to thyroid cancer. The epitope sequence provided herein can have at least 70% sequence identity to peptide sequence selected from the group consisting of SEQ ID NOS 6846-7061, 7359-7448, 7629-8099, and 8619-8744, each of which can be specific to thyroid cancer.

[0230] The tumor expressed proteins provided herein can comprise RBPJL, AQP12A, AQP12B, IAPP, CELA2A, CELA2B, AMY2A, CTRC, G6PC2, KIRREL2, PNLIPRP1, SERPINI2, SYNC, or any combination thereof, each of which can be specific to pancreatic cancer. The epitope sequence provided herein can have at least 50%, at least 60%, at least 70%, at least 80%, at least 85%, at least 90%, at least 95%, or 100% sequence identity to peptide sequence selected from the group consisting of SEQ ID NOS 720-814, 989-1182, 1373-1565, 2120-2211, 2920-3009, 3101-3196, 3320-3440, 5193-5284, 6487-6579, 7062-7150, and 7539-7628, each of which can be specific to pancreatic cancer. The epitope sequence provided herein can have at least 70% sequence identity to peptide sequence selected from the group consisting of SEQ ID NOS 720-814, 989-1182, 1373-1565, 2120-2211, 2920-3009, 3101-3196, 3320-3440, 5193-5284, 6487-6579, 7062-7150, and 7539-7628, each of which can be specific to pancreatic cancer.

[0231] The tumor expressed proteins provided herein can comprise CYP11A1, CYP11B1, CYP11B2, MC2R, STAR, or any combination thereof, each of which can be specific to adrenal cancer. The epitope sequence provided herein can have at least 50%, at least 60%, at least 70%, at least 80%, at least 85%, at least 90%, at least 95%, or 100/6 sequence identity to peptide sequence selected from the group consisting of SEQ ID NOS 2212-2523, 4817-4915, and 7449-7538, each of which can be specific to adrenal cancer. The epitope sequence provided herein can have at least 70% sequence identity to peptide sequence selected from the group consisting of SEQ ID NOS 2212-2523, 4817-4915, and 7449-7538, each of which can be specific to adrenal cancer.

[0232] The tumor expressed proteins provided herein can comprise ALPPL2, POTEE, PRAME, or any combination thereof, each of which can be specific to uterine cancer. The epitope sequence provided herein can have at least 50%, at least 60%, at least 70%, at least 80%, at least 85%, at least 90%, at least 95%, or 100% sequence identity to peptide sequence selected from the group consisting of SEQ ID NOS 627-719, 5285-5431, and 6085-6183, each of which can be specific to uterine cancer. The epitope sequence provided herein can have at least 70% sequence identity to peptide sequence selected from the group consisting of SEQ ID NOS 627-719, 5285-5431, and 6085-6183, each of which can be specific to uterine cancer.

[0233] The tumor expressed proteins provided herein can comprise KLK2, KLK3, KLK4, POTEH, POTEG, TGM4, RLN1, POTEE, PPIAL4G or any combination thereof, each of which can be specific to prostate cancer. The epitope sequence provided herein can have at least 50%, at least 60%, at least 70%, at least 80%, at least 85%, at least 90%, at least 95%, or 100% sequence identity to peptide sequence selected from the group consisting of SEQ ID NOS 3441-4274, 5285-6084, 6580-6845, and 8100-8434, each of which can be specific to prostate cancer. The epitope sequence provided herein can have at least 70% sequence identity to peptide sequence selected from the group consisting of SEQ ID NOS 3441-4274, 5285-6084, 6580-6845, and 8100-8434, each of which can be specific to prostate cancer.

[0234] The tumor expressed proteins provided herein can comprise ANKRD30A, COL10A1, or a combination, each of which can be specific to breast cancer. The epitope sequence provided herein can have at least 50%, at least 60%, at least 70%, at least 80%, at least 85%, at least 90%, at least 95%, or 100% sequence identity to peptide sequence selected from the group consisting of SEQ ID NOS 815-988, and 1749-1867, each of which can be specific to breast cancer. The epitope sequence provided herein can have at least 70% sequence identity to peptide sequence selected from the group consisting of SEQ ID NOS 815-988, and 1749-1867, each of which can be specific to breast cancer.

[0235] The tumor expressed proteins provided herein can comprise CTCFL, PRAME, CLDN6, EPYC, or any combination thereof, each of which can be specific to ovarian cancer. The epitope sequence provided herein can have at least 50%, at least 60%, at least 70%, at least 80%, at least 85%, at least 90%, at least 95%, or 100% sequence identity to peptide sequence selected from the group consisting of SEQ ID NOS 1659-1748, 1964-2119, 2827-2919, and 6085-6183, each of which can be specific to ovarian cancer. The epitope sequence provided herein can have at least 70% sequence identity to peptide sequence selected from the group consisting of SEQ ID NOS 1659-1748, 1964-2119, 2827-2919, and 6085-6183, each of which can be specific to ovarian cancer.

[0236] The tumor expressed proteins provided herein can comprise CTCFL, each of which can be specific to cervical cancer. The epitope sequence provided herein can have at least 50%, at least 60%, at least 70%, at least 80%, at least 85%, at least 90%, at least 95%, or 100% sequence identity to peptide sequence selected from the group consisting of SEQ ID NOS 1964-2119, each of which can be specific to cervical cancer. The epitope sequence provided herein can have at least 70% sequence identity to peptide sequence selected from the group consisting of SEQ ID NOS 1964-2119, each of which can be specific to cervical cancer.

[0237] The tumor expressed proteins provided herein can comprise POTEE, PPIAL4G, or a combination thereof, each of which can be specific to colorectal cancer. The epitope sequence provided herein can have at least 50%, at least 60%, at least 70%, at least 80%, at least 85%, at least 90%, at least 95%, or 100/6 sequence identity to peptide sequence selected from the group consisting of SEQ ID NOS 5285-5431, and 5996-6084, each of which can be specific to colorectal cancer. The epitope sequence provided herein can have at least 70% sequence identity to peptide sequence selected from the group consisting of SEQ ID NOS 5285-5431, and 5996-6084, each of which can be specific to colorectal cancer.

[0238] The tumor expressed proteins provided herein can comprise DLL3, each of which can be specific to glioma. The epitope sequence provided herein can have at least 50%, at least 60%, at least 70%, at least 80%, at least 85%, at least 90%, at least 95%, or 100% sequence identity to peptide sequence selected from the group consisting of SEQ ID NOS 2619-2736, each of which can be specific to glioma. The epitope sequence provided herein can have at least 70% sequence identity to peptide sequence selected from the group consisting of SEQ ID NOS 2619-2736, each of which can be specific to glioma.

[0239] The tumor expressed proteins provided herein can comprise MMP13, each of which can be specific to head and neck cancer. The epitope sequence provided herein can have at least 50%, at least 60%, at least 70%, at least 80%, at least 85%, at least 90%, at least 95%, or 100% sequence identity to peptide sequence selected from the group consisting of SEQ ID NOS 4916-5010, each of which can be specific to head and neck cancer. The epitope sequence provided herein can have at least 70% sequence identity to peptide sequence selected from the group consisting of SEQ ID NOS 4916-5010, each of which can be specific to head and neck cancer.

[0240] The tumor expressed proteins provided herein can comprise DCAF4L2. SSX1, or a combination thereof, each of which can be specific to liver cancer. The epitope sequence provided herein can have at least 50%, at least 60%, at least 70%, at least 80%, at least 85%, at least 90%, at least 95%, or 100% sequence identity to peptide sequence selected from the group consisting of SEQ ID NOS 2524-2618, and 7359-7448, each of which can be specific to liver cancer. The epitope sequence provided herein can have at least 70% sequence identity to peptide sequence selected from the group consisting of SEQ ID NOS 2524-2618, and 7359-7448, each of which can be specific to liver cancer.

[0241] The tumor expressed proteins provided herein can comprise SSX1. MAGEA4, PRAME, CSAG1, MAGEA12, MAGEA2, MAGEC2, PAGE5, PRDM7, SLC45A2, TSPAN10, or any combination thereof, each of which can be specific to melanoma. The epitope sequence provided herein can have at least 50%, at least 60%, at least 70%, at least 80%, at least 85%, at least 90%, at least 95%, or 100% sequence identity to peptide sequence selected from the group consisting of SEQ ID NOS 1868-1963, 4458-4550, 4551-4637,4638-4728, 4729-4816, 5011-5100, 6085-6183, 6184-6307, 7151-7264, 7359-7448, and 8745-8835, each of which can be specific to melanoma. The epitope sequence provided herein can have at least 70% sequence identity to peptide sequence selected from the group consisting of SEQ ID NOS 1868-1963, 4458-4550, 45514637, 46384728, 4729-4816, 5011-5100, 6085-6183, 6184-6307, 7151-7264, 7359-7448, and 8745-8835, each of which can be specific to melanoma.

[0242] The tumor expressed proteins provided herein can comprise MAGEA11, MAGEA4, PRAME, or any combination thereof, each of which can be specific to lung squamous cell carcinoma. The epitope sequence provided herein can have at least 50%, at least 60%, at least 70%, at least 80%, at least 85%, at least 90%, at least 95%, or 100% sequence identity to peptide sequence selected from the group consisting of SEQ ID NOS 4368-4457, 4638-4728, and 6085-6183, each of which can be specific to lung squamous cell carcinoma. The epitope sequence provided herein can have at least 70% sequence identity to peptide sequence selected from the group consisting of SEQ ID NOS 4368-4457, 4638-4728, and 6085-6183, each of which can be specific to lung squamous cell carcinoma.

[0243] The tumor expressed proteins provided herein can comprise ACTL7A, ACTL7B, ACTL9, ACTRT2, ADAD1, AKAP4, C2orf53, CCDC70, CETN1, DMRTB1, HMGB4, KIF2B, LELP1, PGK2, PRM1, PRM2, SPATA8, TNP1, TPD52L3, UBQLN3, or any combination thereof, each of which can be specific to testis cancer. The epitope sequence provided herein can have at least 50%, at least 60%, at least 70%, at least 80%, at least 85%, at least 90%, at least 95%, or 100% sequence identity to peptide sequence selected from the group consisting of SEQ ID NOS 1-626, 1183-1372, 1566-1658, 2737-2826, 3010-3100, 3197-3319, 4275-4367, 5101-5192, 6308-6486, 7265-7358, 8435-8618, and 8836-8962, each of which can be specific to testis cancer. The epitope sequence provided herein can have at least 70% sequence identity to peptide sequence selected from the group consisting of SEQ ID NOS 1-626, 1183-1372, 1566-1658, 2737-2826, 3010-3100, 3197-3319, 4275-4367, 5101-5192, 6308-6486, 7265-7358, 8435-8618, and 8836-8962, each of which can be specific to testis cancer.

[0244] Table 1A provides a summary of numerous peptide sequences that can be tissue-specific antigens, also listed are the HLA alleles that are predicted to bind to the peptide sequences, respectively, as well as the types of cancers that the peptide sequences are specific to, respectively.

[0245] Table 1B provides a summary of exemplary, peptide sequences that can be tissue-specific antigens, also listed are the HLA alleles that are predicted to bind to the peptide sequences, respectively. as well as the types of cancers that the peptide sequences are specific to, respectively.

[0246] Table 1C provides a summary of exemplary peptide sequences from Table 1B that were validated from mass spectrometry as being presented by antigen presenting cells.

TABLE 1A
Tumor Epitope Sequences

| peptide | allele | gene | cancer | SEQ |
|---|---|---|---|---|
| FNTPAMHIAY | HLA-A01:01 | ACTL7A | Testis | 1 |
| WDTVQDIWEY | HLA-A01:01 | ACTL7A | Testis | 2 |
| NTPAMHIAY | HLA-A01:01 | ACTL7A | Testis | 3 |
| TVQDIWEYLF | HLA-A01:01 | ACTL7A | Testis | 4 |
| LSEHTIRY | HLA-A01:01 | ACTL7A | Testis | 5 |
| VVEVGHGVSY | HLA-A01:01 | ACTL7A | Testis | 6 |
| YEEHGPFFLY | HLA-A01:01 | ACTL7A | Testis | 7 |
| YLLGLINSA | HLA-A02:01 | ACTL7A | Testis | 8 |
| MLFEAFNTPA | HLA-A02:01 | ACTL7A | Testis | 9 |
| YLFRQEMKI | HLA-A02:01 | ACTL7A | Testis | 10 |
| MLSGFPNRL | HLA-A02:01 | ACTL7A | Testis | 11 |
| SLQGFQPLWV | HLA-A02:01 | ACTL7A | Testis | 12 |
| FLCSEMFFKPSL | HLA-A02:01 | ACTL7A | Testis | 13 |
| AYLLGLLNSA | HLA-A02:01 | ACTL7A | Testis | 14 |
| SDLTAYLLGL | HLA-A02:01 | ACTL7A | Testis | 15 |
| ILLCGGSTML | HLA-A02:01 | ACTL7A | Testis | 16 |
| KIAPEEHAV | HLA-A02:01 | ACTL7A | Testis | 17 |
| VLPDGKEIQL | HLA-A02:01 | ACTL7A | Testis | 18 |
| ALDPIEEKKV | HLA-A02:01 | ACTL7A | Testis | 19 |
| YVLPDGKEIQL | HLA-A02:01 | ACTL7A | Testis | 20 |
| VLPERDSAV | HLA-A02:01 | ACTL7A | Testis | 21 |
| RTSGLVVEV | HLA-A02:01 | ACTL7A | Testis | 22 |
| MLSGFPNRLQK | HLA-A03:01 | ACTL7A | Testis | 23 |
| MFFKPSLIK | HLA-A03:01 | ACTL7A | Testis | 24 |
| RFLCSEMFFK | HLA-A03:01 | ACTL7A | Testis | 25 |
| AIMGDGPTKK | HLA-A03:01 | ACTL7A | Testis | 26 |
| AIMGDGPTK | HLA-A03:01 | ACTL7A | Testis | 27 |
| SGFPNRLQK | HLA-A03:01 | ACTL7A | Testis | 28 |
| STMLSGFPNR | HLA-A11:01 | ACTL7A | Testis | 29 |
| FLCSEMFFK | HLA-A11:01 | ACTL7A | Testis | 30 |
| HTIRYVLPDGK | HLA-A11:01 | ACTL7A | Testis | 31 |
| AIMGDGPTKK | HLA-A11:01 | ACTL7A | Testis | 32 |
| AIMGDGPTK | HLA-A11:01 | ACTL7A | Testis | 33 |
| KYAEMLFEAF | HLA-A24:02 | ACTL7A | Testis | 34 |
| RFLCSEMFF | HLA-A24:02 | ACTL7A | Testis | 35 |
| GFQPLWVHRF | HLA-A24:02 | ACTL7A | Testis | 36 |
| EYEEHGPFF | HLA-A24:02 | ACTL7A | Testis | 37 |
| SGFPNRLQK | HLA-A30:01 | ACTL7A | Testis | 38 |
| MFFKPSLIK | HLA-A30:01 | ACTL7A | Testis | 39 |
| QSRLSMYSY | HLA-A30:01 | ACTL7A | Testis | 40 |
| RTSGLVVEV | HLA-A30:01 | ACTL7A | Testis | 41 |
| HTQTVSCLNK | HLA-A30:01 | ACTL7A | Testis | 42 |
| HLKLVNPLR | HLA-A33:03 | ACTL7A | Testis | 43 |
| STMLSGFPNR | HLA-A33:03 | ACTL7A | Testis | 44 |
| TMLSGFPNR | HLA-A33:03 | ACTL7A | Testis | 45 |
| ETAKTGDNR | HLA-A33:03 | ACTL7A | Testis | 46 |
| EHGPFFLYR | HLA-A33:03 | ACTL7A | Testis | 47 |
| VPIYEGYPL | HLA-B07:02 | ACTL7A | Testis | 48 |
| RPKQEVTKAV | HLA-B07:02 | ACTL7A | Testis | 49 |
| FPNRLQKEL | HLA-B07:02 | ACTL7A | Testis | 50 |
| APLQTQAL | HLA-B07:02 | ACTL7A | Testis | 51 |
| LPDGKEIQL | HLA-B07:02 | ACTL7A | Testis | 52 |
| NVHLKLVNPL | HLA-B08:01 | ACTL7A | Testis | 53 |
| HLKLVNPL | HLA-B08:01 | ACTL7A | Testis | 54 |
| TNREKYAEM | HLA-B08:01 | ACTL7A | Testis | 55 |
| DIKKKCCF | HLA-B08:01 | ACTL7A | Testis | 56 |
| DIKKKCCFV | HLA-B08:01 | ACTL7A | Testis | 57 |
| DIALKRDL | HLA-B08:01 | ACTL7A | Testis | 58 |
| SEMFFKPSLI | HLA-B13:02 | ACTL7A | Testis | 59 |
| YEGYPLPSI | HLA-B13:02 | ACTL7A | Testis | 60 |
| SEMFFKPSL | HLA-B13:02 | ACTL7A | Testis | 61 |
| FEYEEHGPFFL | HLA-B13:02 | ACTL7A | Testis | 62 |
| GLPRPTHKI | HLA-B13:02 | ACTL7A | Testis | 63 |
| YLFRQEMKI | HLA-B13:02 | ACTL7A | Testis | 64 |
| RTSGLVVEV | HLA-B13:02 | ACTL7A | Testis | 65 |
| YAGSDLTAY | HLA-B46:01 | ACTL7A | Testis | 66 |
| IAYQSRLSM | HLA-B46:01 | ACTL7A | Testis | 67 |
| YSYGRTSQL | HLA-B46:01 | ACTL7A | Testis | 68 |
| YVVPIYEGY | HLA-B46:01 | ACTL7A | Testis | 69 |
| VEVGHGVSY | HLA-B46:01 | ACTL7A | Testis | 70 |
| YSYGRTSGL | HLA-C01:02 | ACTL7A | Testis | 71 |
| IAPEEHAVL | HLA-C01:02 | ACTL7A | Testis | 72 |
| IAYQSRLSM | HLA-C01:02 | ACTL7A | Testis | 73 |
| VLPERDSAV | HLA-C01:02 | ACTL7A | Testis | 74 |
| QAPLQTQAL | HLA-C01:02 | ACTL7A | Testis | 75 |
| YSYGRTSGL | HLA-C03:04 | ACTL7A | Testis | 76 |
| IAYQSRLSM | HLA-C03:04 | ACTL7A | Testis | 77 |
| SAVWTGGSI | HLA-C03:04 | ACTL7A | Testis | 78 |
| ASLQGFQPL | HLA-C03:04 | ACTL7A | Testis | 79 |
| LAPEEHAVE | HLA-C03:04 | ACTL7A | Testis | 80 |
| FEYEEHGPFF | HLA-C04:01 | ACTL7A | Testis | 81 |
| MWAPPAAIM | HLA-C04:01 | ACTL7A | Testis | 82 |
| YEEHGPFFL | HLA-C04:01 | ACTL7A | Testis | 83 |
| VQDIWEYLF | HLA-C04:01 | ACTL7A | Testis | 84 |
| EYEEHGPFF | HLA-C04:01 | ACTL7A | Testis | 85 |
| VQDIWEYL | HLA-C04:01 | ACTL7A | Testis | 86 |
| YSYGRTSGL | HLA-C07:01 | ACTL7A | Testis | 87 |
| MHIAYQSRL | HLA-C07:01 | ACTL7A | Testis | 88 |
| YSYGRTSGLV | HLA-C07:01 | ACTL7A | Testis | 89 |
| LRHGIIVD | HLA-C07:01 | ACTL7A | Testis | 90 |
| TVQDIWEY | HLA-C07:01 | ACTL7A | Testis | 91 |
| HRFEYEEHG | HLA-C07:01 | ACTL7A | Testis | 92 |
| YSYGRTSGL | HLA-C07:02 | ACTL7A | Testis | 93 |
| MHIAYQSRL | HLA-C07:02 | ACTL7A | Testis | 94 |
| FKPSLIKSM | HLA-C07:02 | ACTL7A | Testis | 95 |
| IAPEEHAVL | HLA-C07:02 | ACTL7A | Testis | 96 |
| SRLSMYSY | HLA-C07:02 | ACTL7A | Testis | 97 |
| VTSQSLLSIY | HLA-A01:01 | ACTL7B | Testis | 98 |
| FTDDHLHII | HLA-A01:01 | ACTL7B | Testis | 99 |
| TSQSLLSIY | HLA-A01:01 | ACTL7B | Testis | 100 |
| IIDLGSQY | HLA-A01:01 | ACTL7B | Testis | 101 |
| FTDDHLHI | HLA-A01:01 | ACTL7B | Testis | 102 |
| YLMQLLNEA | HLA-A02:01 | ACTL7B | Testis | 103 |
| LMFETFGIPA | HLA-A02:01 | ACTL7B | Testis | 104 |
| YAELMFETFGI | HLA-A02:01 | ACTL7B | Testis | 105 |
| FLPEEELGL | HLA-A02:01 | ACTL7B | Testis | 106 |
| AELMFETFGI | HLA-A02:01 | ACTL7B | Testis | 107 |
| ELMFETFGI | HLA-A02:01 | ACTL7B | Testis | 108 |
| FLPEEELGLV | HLA-A02:01 | ACTL7B | Testis | 109 |
| LMFETFGI | HLA-A02:01 | ACTL7B | Testis | 110 |
| NYLMQLLNEA | HLA-A02:01 | ACTL7B | Testis | 111 |
| KILPEEHAV | HLA-A02:01 | ACTL7B | Testis | 112 |
| GLVPEELRV | HLA-A02:01 | ACTL7B | Testis | 113 |
| ILPEEHAVLV | HLA-A02:01 | ACTL7B | Testis | 114 |
| ILPEEHAVL | HLA-A02:01 | ACTL7B | Testis | 115 |
| SLAGSTQPGL | HLA-A02:01 | ACTL7B | Testis | 116 |
| LLCPGDSPAV | HLA-A02:01 | ACTL7B | Testis | 117 |
| SLLSIYSYGK | HLA-A03:01 | ACTL7B | Testis | 118 |
| KMKPRKVHK | HLA-A03:01 | ACTL7B | Testis | 119 |
| LLSIYSYGK | HLA-A03:01 | ACTL7B | Testis | 120 |
| AVAAAPERK | HLA-A03:01 | ACTL7B | Testis | 121 |
| HIIEHIKKK | HLA-A03:01 | ACTL7B | Testis | 122 |
| SLLSIYSYGK | HLA-A11:01 | ACTL7B | Testis | 123 |
| AVAAAPERK | HLA-A11:01 | ACTL7B | Testis | 124 |
| LLSIYSYGK | HLA-A11:01 | ACTL7B | Testis | 125 |
| VIIDLGSQYCK | HLA-A11:01 | ACTL7B | Testis | 126 |
| AFQQLWVSK | HLA-A11:01 | ACTL7B | Testis | 127 |
| KYAELMFETF | HLA-A24:02 | ACTL7B | Testis | 128 |
| RFRCSEMLF | HLA-A24:02 | ACTL7B | Testis | 129 |
| EKYAELMFETF | HLA-A24:02 | ACTL7B | Testis | 130 |
| GYAGEPRPTYF | HLA-A24:02 | ACTL7B | Testis | 131 |
| AFTDDHLHI | HLA-A24:02 | ACTL7B | Testis | 132 |
| KMKPRKVHK | HLA-A30:01 | ACTL7B | Testis | 133 |
| ATRNSPMPL | HLA-A30:01 | ACTL7B | Testis | 134 |
| MATRNSPMPL | HLA-A30:01 | ACTL7B | Testis | 135 |
| KIKAVIIDL | HLA-A30:01 | ACTL7B | Testis | 136 |
| HIIEHIKKK | HLA-A30:01 | ACTL7B | Testis | 137 |
| TMLDGFPER | HLA-A33:03 | ACTL7B | Testis | 138 |
| DVLPGLTSR | HLA-A33:03 | ACTL7B | Testis | 139 |
| CTMLDGFPER | HLA-A33:03 | ACTL7B | Testis | 140 |
| EAADAGDTR | HLA-A33:03 | ACTL7B | Testis | 141 |
| APLKLVNPL | HLA-B07:02 | ACTL7B | Testis | 142 |
| RPTYFISSTV | HLA-B07:02 | ACTL7B | Testis | 143 |
| FPERFQREL | HLA-B07:02 | ACTL7B | Testis | 144 |
| SPMPLGTAQ | HLA-B07:02 | ACTL7B | Testis | 145 |
| VPISEGDVL | HLA-B07:02 | ACTL7B | Testis | 146 |
| SNREKYAEL | HLA-B08:01 | ACTL7B | Testis | 147 |
| HIKKKCCYA | HLA-B08:01 | ACTL7B | Testis | 148 |
| HIKKKCCYAAF | HLA-B08:01 | ACTL7B | Testis | 149 |
| AGDTRKWTL | HLA-B08:01 | ACTL7B | Testis | 150 |
| AAPERKTSV | HLA-B08:01 | ACTL7B | Testis | 151 |
| ERFQRELSL | HLA-B08:01 | ACTL7B | Testis | 152 |
| AELMFETFGI | HLA-B13:02 | ACTL7B | Testis | 153 |
| SEMLFQPSL | HLA-B13:02 | ACTL7B | Testis | 154 |
| WEYIFRTAMKI | HLA-B13:02 | ACTL7B | Testis | 155 |
| GLVPEELRV | HLA-B13:02 | ACTL7B | Testis | 156 |
| YIFRTAMKI | HLA-B13:02 | ACTL7B | Testis | 157 |
| HLHIIEHI | HLA-B13:02 | ACTL7B | Testis | 158 |
| YSYGKTSGL | HLA-B46:01 | ACTL7B | Testis | 159 |
| LLNEAGHAF | HLA-B46:01 | ACTL7B | Testis | 160 |
| SILASLQAF | HLA-B46:01 | ACTL7B | Testis | 161 |
| VIIDLGSQY | HLA-B46:01 | ACTL7B | Testis | 162 |
| YAGEPRPTY | HLA-B46:01 | ACTL7B | Testis | 163 |
| AMHVTSQSL | HLA-B46:01 | ACTL7B | Testis | 164 |
| YSYGKTSGL | HLA-C01:02 | ACTL7B | Testis | 165 |
| ILPEEHAVL | HLA-C01:02 | ACTL7B | Testis | 166 |
| FTDDHLHII | HLA-C01:02 | ACTL7B | Testis | 167 |
| AAPERKTSV | HLA-C01:02 | ACTL7B | Testis | 168 |
| FLPEEELGL | HLA-C01:02 | ACTL7B | Testis | 169 |
| YSYGKTSGL | HLA-C03:04 | ACTL7B | Testis | 170 |
| MATRNSPMPL | HLA-C03:04 | ACTL7B | Testis | 171 |
| SVWTGGSIL | HLA-C03:04 | ACTL7B | Testis | 172 |
| STQPGLPEL | HLA-C03:04 | ACTL7B | Testis | 173 |
| AAFLPEEEL | HLA-C03:04 | ACTL7B | Testis | 174 |
| FTDDHLHIL | HLA-C04:01 | ACTL7B | Testis | 175 |
| MLDGFPERF | HLA-C04:01 | ACTL7B | Testis | 176 |
| RFRCSEMLF | HLA-C04:01 | ACTL7B | Testis | 177 |
| VQDIWEYIF | HLA-C04:01 | ACTL7B | Testis | 178 |
| ERFQRELSI | HLA-C07:01 | ACTL7B | Testis | 179 |
| YSYGKTSGL | HLA-C07:01 | ACTL7B | Testis | 180 |
| ERFRCSEML | HLA-C07:01 | ACTL7B | Testis | 181 |
| TRPGPDASL | HLA-C07:01 | ACTL7B | Testis | 182 |
| LRVDYELPD | HLA-C07:01 | ACTL7B | Testis | 183 |
| YSYGKTSGL | HLA-C07:02 | ACTL7B | Testis | 184 |
| ERFQRELSI | HLA-C07:02 | ACTL7B | Testis | 185 |
| RFRCSEMLF | HLA-C07:02 | ACTL7B | Testis | 186 |
| TRPGPDASL | HLA-C07:02 | ACTL7B | Testis | 187 |
| ILPEEHAVL | HLA-C07:02 | ACTL7B | Testis | 188 |
| TRNSPMPL | HLA-C07:02 | ACTL7B | Testis | 189 |
| VVDTGHGVTY | HLA-A01:01 | ACTL9 | Testis | 190 |
| YTVPVFQGY | HLA-A01:01 | ACTL9 | Testis | 191 |
| ASQSVLSVY | HLA-A01:01 | ACTL9 | Testis | 192 |
| LVENIKHHY | HLA-A01:01 | ACTL9 | Testis | 193 |
| FLAEMLLQA | HLA-A02:01 | ACTL9 | Testis | 194 |
| HLLEHDLRV | HLA-A02:01 | ACTL9 | Testis | 195 |
| FLAEMLLQAGL | HLA-A02:01 | ACTL9 | Testis | 196 |
| KLVEVAFESL | HLA-A02:01 | ACTL9 | Testis | 197 |
| MLLQAGLPL | HLA-A02:01 | ACTL9 | Testis | 198 |
| AMYVASQSV | HLA-A02:01 | ACTL9 | Testis | 199 |
| AFLAEMLLQA | HLA-A02:01 | ACTL9 | Testis | 200 |
| RVLPELTLV | HLA-A02:01 | ACTL9 | Testis | 201 |
| AFLAEMLLQAGL | HLA-A02:01 | ACTL9 | Testis | 202 |
| KLPDGRTVTL | HLA-A02:01 | ACTL9 | Testis | 203 |
| ELLFNPPEV | HLA-A02:01 | ACTL9 | Testis | 204 |
| ALPAETHVV | HLA-A02:01 | ACTL9 | Testis | 205 |
| LLFNPPEV | HLA-A02:01 | ACTL9 | Testis | 206 |
| STMAKQSLRK | HLA-A03:01 | ACTL9 | Testis | 207 |
| TMAKQSLRK | HLA-A03:01 | ACTL9 | Testis | 208 |
| GMVADRLPPK | HLA-A03:01 | ACTL9 | Testis | 209 |
| MVADRLPPK | HLA-A03:01 | ACTL9 | Testis | 210 |
| VVIDMGTGTCK | HLA-A03:01 | ACTL9 | Testis | 211 |
| STMAKQSLRK | HLA-A11:01 | ACTL9 | Testis | 212 |
| MVADRLPPK | HLA-A11:01 | ACTL9 | Testis | 213 |
| ATILGCQPK | HLA-A11:01 | ACTL9 | Testis | 214 |
| VVIDMGTGTCK | HLA-A11:01 | ACTL9 | Testis | 215 |
| ATILGCQPKK | HLA-A11:01 | ACTL9 | Testis | 216 |
| LFQCPELLF | HLA-A24:02 | ACTL9 | Testis | 217 |
| HYCYVASDF | HLA-A24:02 | ACTL9 | Testis | 218 |
| MYVASQSVL | HLA-A24:02 | ACTL9 | Testis | 219 |
| HHYCYVASDF | HLA-A24:02 | ACTL9 | Testis | 220 |
| QYEEQGPYI | HLA-A24:02 | ACTL9 | Testis | 221 |
| RFRAELLRA | HLA-A30:01 | ACTL9 | Testis | 222 |
| SLRSPAMYV | HLA-A30:01 | ACTL9 | Testis | 223 |
| MVADRLPPK | HLA-A30:01 | ACTL9 | Testis | 224 |
| ASRPKSSES | HLA-A30:01 | ACTL9 | Testis | 225 |
| ATILGCQPK | HLA-A30:01 | ACTL9 | Testis | 226 |
| NIKHHYCYV | HLA-A30:01 | ACTL9 | Testis | 227 |
| STMAKQSLR | HLA-A33:03 | ACTL9 | Testis | 228 |
| QTFIGEAAR | HLA-A33:03 | ACTL9 | Testis | 229 |
| SVLSVYAHGR | HLA-A33:03 | ACTL9 | Testis | 230 |
| EEQGPYIVYR | HLA-A33:03 | ACTL9 | Testis | 231 |
| EQGPYIVYR | HLA-A33:03 | ACTL9 | Testis | 232 |
| NVVNKPLQR | HLA-A33:03 | ACTL9 | Testis | 233 |
| SPNVVNKPL | HLA-B07:02 | ACTL9 | Testis | 234 |
| KPATSGQSGL | HLA-B07:02 | ACTL9 | Testis | 235 |
| RPEQEYKRTL | HLA-B07:02 | ACTL9 | Testis | 236 |
| LPDGRTVTL | HLA-B07:02 | ACTL9 | Testis | 237 |
| SPATNREKL | HLA-B07:02 | ACTL9 | Testis | 238 |
| MAKQSLRKLSL | HLA-B08:01 | ACTL9 | Testis | 239 |
| NIKHHYCYV | HLA-B08:01 | ACTL9 | Testis | 240 |
| TMAKQSLRKLSL | HLA-B08:01 | ACTL9 | Testis | 241 |
| KQSLRKLSL | HLA-B08:01 | ACTL9 | Testis | 242 |
| ELIWRHLL | HLA-B08:01 | ACTL9 | Testis | 243 |
| EQEYKRTL | HLA-B08:01 | ACTL9 | Testis | 244 |
| VDWDAAELI | HLA-B13:02 | ACTL9 | Testis | 245 |
| VVDWDAAELI | HLA-B13:02 | ACTL9 | Testis | 246 |
| AELIWRHLL | HLA-B13:02 | ACTL9 | Testis | 247 |
| GQSGLQTFI | HLA-B13:02 | ACTL9 | Testis | 248 |
| GQASPTYTV | HLA-B13:02 | ACTL9 | Testis | 249 |
| RVLPELTLV | HLA-B13:02 | ACTL9 | Testis | 250 |
| YTVPVFQGY | HLA-B46:01 | ACTL9 | Testis | 251 |
| FAGQASPTY | HLA-B46:01 | ACTL9 | Testis | 252 |
| FSVWIGGSI | HLA-B46:01 | ACTL9 | Testis | 253 |
| VAAQPTRNF | HLA-B46:01 | ACTL9 | Testis | 254 |
| VLREQYEEQ | HLA-B46:01 | ACTL9 | Testis | 255 |
| ASRPKSSES | HLA-B46:01 | ACTL9 | Testis | 256 |
| MLLQAGLPL | HLA-C01:02 | ACTL9 | Testis | 257 |
| LSPVGLSTM | HLA-C01:02 | ACTL9 | Testis | 258 |
| FIGEAARVL | HLA-C01:02 | ACTL9 | Testis | 259 |
| KLPDGRTVTL | HLA-C01:02 | ACTL9 | Testis | 260 |
| FSPATNREK | HLA-C01:02 | ACTL9 | Testis | 261 |
| YAHGRVSGL | HLA-C03:04 | ACTL9 | Testis | 262 |
| MLLQAGLPL | HLA-C03:04 | ACTL9 | Testis | 263 |
| FSVWIGGSI | HLA-C03:04 | ACTL9 | Testis | 264 |
| FIGEAARVL | HLA-C03:04 | ACTL9 | Testis | 265 |
| FSDPPFSPA | HLA-C03:04 | ACTL9 | Testis | 266 |
| LFQCPELLF | HLA-C04:01 | ACTL9 | Testis | 267 |
| FSDPPFSPA | HLA-C04:01 | ACTL9 | Testis | 268 |
| RLDLAGNHL | HLA-C04:01 | ACTL9 | Testis | 269 |
| VVDWDAAEL | HLA-C04:01 | ACTL9 | Testis | 270 |
| HYCYVASDF | HLA-C04:01 | ACTL9 | Testis | 271 |
| FRAELLRAL | HLA-C07:01 | ACTL9 | Testis | 272 |
| MRADLAQNV | HLA-C07:01 | ACTL9 | Testis | 273 |
| MRADLAQNVL | HLA-C07:01 | ACTL9 | Testis | 274 |
| LRSGIVVD | HLA-C07:01 | ACTL9 | Testis | 275 |
| RAFQSCWVL | HLA-C07:01 | ACTL9 | Testis | 276 |
| RSGIVVDWD | HLA-C07:01 | ACTL9 | Testis | 277 |
| FRAELLRAL | HLA-C07:02 | ACTL9 | Testis | 278 |
| ATHDHPLLF | HLA-C07:02 | ACTL9 | Testis | 279 |
| MYVASQSVL | HLA-C07:02 | ACTL9 | Testis | 280 |
| ARVLPELTL | HLA-C07:02 | ACTL9 | Testis | 281 |
| FNPPEVPGL | HLA-C07:02 | ACTL9 | Testis | 282 |
| LSDQAVLALY | HLA-A01:01 | ACTRT2 | Testis | 283 |
| YLSDQAVLALY | HLA-A01:01 | ACTRT2 | Testis | 284 |
| FYLSDQAVLALY | HLA-A01:01 | ACTRT2 | Testis | 285 |
| DTDIQKILF | HLA-A01:01 | ACTRT2 | Testis | 286 |
| LSDQAVLAL | HLA-A01:01 | ACTRT2 | Testis | 287 |
| HLFEWELGV | HLA-A02:01 | ACTRT2 | Testis | 288 |
| KHLFEWELGV | HLA-A02:01 | ACTRT2 | Testis | 289 |
| KMAEVMFENFGV | HLA-A02:01 | ACTRT2 | Testis | 290 |
| YLSDQAVLAL | HLA-A02:01 | ACTRT2 | Testis | 291 |
| YLSDQAVLA | HLA-A02:01 | ACTRT2 | Testis | 292 |
| WKHLFEWELGV | HLA-A02:01 | ACTRT2 | Testis | 293 |
| SLSSFKQMWV | HLA-A02:01 | ACTRT2 | Testis | 294 |
| VMFENFGVPA | HLA-A02:01 | ACTRT2 | Testis | 295 |
| LWKHLFEWELGV | HLA-A02:01 | ACTRT2 | Testis | 296 |
| KLPDQNIISL | HLA-A02:01 | ACTRT2 | Testis | 297 |
| SLGDPLHQA | HLA-A02:01 | ACTRT2 | Testis | 298 |
| RLLKELEQL | HLA-A02:01 | ACTRT2 | Testis | 299 |
| GLDDRLLKEL | HLA-A02:01 | ACTRT2 | Testis | 300 |
| SLPHAVTKL | HLA-A02:01 | ACTRT2 | Testis | 301 |
| GLDDRLLKE | HLA-A02:01 | ACTRT2 | Testis | 302 |
| IVTSLSSFK | HLA-A03:01 | ACTRT2 | Testis | 303 |
| SIVTSLSSFK | HLA-A03:01 | ACTRT2 | Testis | 304 |
| TLFHGLDDRLLK | HLA-A03:01 | ACTRI2 | Testis | 305 |
| VIFDNGSGFCK | HLA-A03:01 | ACTRT2 | Testis | 306 |
| HTFPCQLDK | HLA-A03:01 | ACTRT2 | Testis | 307 |
| HLFEWELGVK | HLA-A03:01 | ACTRT2 | Testis | 308 |
| SIVTSLSSFK | HLA-A11:01 | ACTRT2 | Testis | 309 |
| IVTSLSSFK | HLA-A11:01 | ACTRT2 | Testis | 310 |
| HTFPCQLDK | HLA-A11:01 | ACTRT2 | Testis | 311 |
| VIFDNGSGFCK | HLA-A11:01 | ACTRT2 | Testis | 312 |
| YSLPHAVTK | HLA-A11:01 | ACTRT2 | Testis | 313 |
| KMAEVMFENF | HLA-A24:02 | ACTRT2 | Testis | 314 |
| RLWKHLFEW | HLA-A24:02 | ACTRT2 | Testis | 315 |
| LYASACVTQL | HLA-A24:02 | ACTRT2 | Testis | 316 |
| FYLSDQAVL | HLA-A24:02 | ACTRT2 | Testis | 317 |
| VLSGGTTLF | HLA-A24:02 | ACTRT2 | Testis | 318 |
| RWFSTWIGA | HLA-A30:01 | ACTRT2 | Testis | 319 |
| YSLPHAVTK | HLA-A30:01 | ACTRT2 | Testis | 320 |
| HTFPCQLDK | HLA-A30:01 | ACTRT2 | Testis | 321 |
| ITKCDTDIQK | HLA-A30:01 | ACTRT2 | Testis | 322 |
| GLVDDIKKK | HLA-A30:01 | ACTRT2 | Testis | 323 |
| VTKLHVAGR | HLA-A33:03 | ACTRT2 | Testis | 324 |
| EFGTSVVQR | HLA-A33:03 | ACTRT2 | Testis | 325 |
| EFGTSVVQRR | HLA-A33:03 | ACTRT2 | Testis | 326 |
| AVTKLHVAGR | HLA-A33:03 | ACTRT2 | Testis | 327 |
| DFKEFGTSVVQR | HLA-A33:03 | ACTRT2 | Testis | 328 |
| GPRHMVSSI | HLA-B07:02 | ACTRT2 | Testis | 329 |
| FGPRHMVSSI | HLA-B07:02 | ACTRT2 | Testis | 330 |
| VPIFEGYSL | HLA-B07:02 | ACTRT2 | Testis | 331 |
| LPDGNIISL | HLA-B07:02 | ACTRT2 | Testis | 332 |
| QPLLATEPSL | HLA-B07:02 | ACTRT2 | Testis | 333 |
| DIKKKLCYV | HLA-B08:01 | ACTRT2 | Testis | 334 |
| FGPRHMVSSI | HLA-B08:01 | ACTRT2 | Testis | 335 |
| DIKKKLCYVAL | HLA-B08:01 | ACTRT2 | Testis | 336 |
| EANQKKYFV | HLA-B08:01 | ACTRT2 | Testis | 337 |
| EALYKQEAL | HLA-B08:01 | ACTRT2 | Testis | 338 |
| ADFKEFGTSV | HLA-B13:02 | ACTRT2 | Testis | 339 |
| AEVMFENFGV | HLA-B13:02 | ACTRT2 | Testis | 340 |
| FEGYSLPHAV | HLA-B13:02 | ACTRT2 | Testis | 341 |
| HQAPEALFV | HLA-B13:02 | ACTRT2 | Testis | 342 |
| HLFEWELGV | HLA-B13:02 | ACTRT2 | Testis | 343 |
| KCDTDIQKI | HLA-B13:02 | ACTRT2 | Testis | 344 |
| SIVTSLSSF | HLA-B46:01 | ACTRT2 | Testis | 345 |
| FSTWIGASI | HLA-B46:01 | ACTRT2 | Testis | 346 |
| YASACVTGL | HLA-B46:01 | ACTRT2 | Testis | 347 |
| VIFDNGSGF | HLA-B46:01 | ACTRT2 | Testis | 348 |
| SSIVGHLKF | HLA-B46:01 | ACTRT2 | Testis | 349 |
| ASIVTSLSSF | HLA-B46:01 | ACTRT2 | Testis | 350 |
| LSDQAVLAL | HLA-C01:02 | ACTRI2 | Testis | 351 |
| YASACVTGL | HLA-C01:02 | ACTRT2 | Testis | 352 |
| FSTWIGASI | HLA-C01:02 | ACTRT2 | Testis | 353 |
| KLPDGNIISL | HLA-C01:02 | ACTRT2 | Testis | 354 |
| SLPHAVTKL | HLA-C01:02 | ACTRT2 | Testis | 355 |
| FGPRHMVSSI | HLA-C01:02 | ACTRT2 | Testis | 356 |
| YASACVTGL | HLA-C03:04 | ACTRT2 | Testis | 357 |
| FSTWIGASI | HLA-C03:04 | ACTRT2 | Testis | 358 |
| IVLSGGTTL | HLA-C03:04 | ACTRT2 | Testis | 359 |
| HALDSPAVI | HLA-C03:04 | ACTRT2 | Testis | 360 |
| VALEPEKEL | HLA-C03:04 | ACTRT2 | Testis | 361 |
| LSDQAVLAL | HLA-C03:04 | ACTRT2 | Testis | 362 |
| FYLSDQAVLAL | HLA-C04:01 | ACTRT2 | Testis | 363 |
| LHQAPEALF | HLA-C04:01 | ACTRT2 | Testis | 364 |
| ALDSPAVIF | HLA-C04:01 | ACTRT2 | Testis | 365 |
| IFDNGSGF | HLA-C04:01 | ACTRT2 | Testis | 366 |
| IFDNGSGFC | HLA-C04:01 | ACTRT2 | Testis | 367 |
| FSTWIGASI | HLA-C07:01 | ACTRT2 | Testis | 368 |
| NREKMAEVM | HLA-C07:01 | ACTRT2 | Testis | 369 |
| FYLSDQAVL | HLA-C07:01 | ACTRT2 | Testis | 370 |
| RRPEEVLRE | HLA-C07:01 | ACTRT2 | Testis | 371 |
| RRPEEVLREY | HLA-C07:01 | ACTRT2 | Testis | 372 |
| SRRPEEVL | HLA-C07:01 | ACTRT2 | Testis | 373 |
| FYLSDQAVL | HLA-C07:02 | ACTRT2 | Testis | 374 |
| LYKQEALQL | HLA-C07:02 | ACTRT2 | Testis | 375 |
| KYFVGEEAL | HLA-C07:02 | ACTRT2 | Testis | 376 |
| RRPEEVLREY | HLA-C07:02 | ACTRT2 | Testis | 377 |
| SRRPEEVL | HLA-C07:02 | ACTRT2 | Testis | 378 |
| LTSKLPMFY | HLA-A01:01 | ADAD1 | Testis | 379 |
| ALTSKLPMFY | HLA-A01:01 | ADAD1 | Testis | 380 |
| VTARRSLLRY | HLA-A01:01 | ADAD1 | Testis | 381 |
| LSELAYVSKVHY | HLA-A01:01 | ADAD1 | Testis | 382 |
| LLSHFIQPV | HLA-A02:01 | ADAD1 | Testis | 383 |
| ALLSHFIQPV | HLA-A02:01 | ADAD1 | Testis | 384 |
| VVLSELAYV | HLA-A02:01 | ADAD1 | Testis | 385 |
| KMASKVTQV | HLA-A02:01 | ADAD1 | Testis | 386 |
| SLVPSAYPL | HLA-A02:01 | ADAD1 | Testis | 387 |
| KLALDELLQL | HLA-A02:01 | ADAD1 | Testis | 388 |
| NLSSISNPV | HLA-A02:01 | ADAD1 | Testis | 389 |
| SLLRYFYRQL | HLA-A02:01 | ADAD1 | Testis | 390 |
| MLSRFNLLA | HLA-A02:01 | ADAD1 | Testis | 391 |
| AMLSRFNLL | HLA-A02:01 | ADAD1 | Testis | 392 |
| AMMEKSIFCT | HLA-A02:01 | ADAD1 | Testis | 393 |
| ALDELLQL | HLA-A02:01 | ADAD1 | Testis | 394 |
| FIIERAGQHEV | HLA-A02:01 | ADAD1 | Testis | 395 |
| VLHDTHAVV | HLA-A02:01 | ADAD1 | Testis | 396 |
| VLSELAYV | HLA-A02:01 | ADAD1 | Testis | 397 |
| QLDEPEPRI | HLA-A02:01 | ADAD1 | Testis | 398 |
| ALDELLQLD | HLA-A02:01 | ADAD1 | Testis | 399 |
| MLSRFNLLAK | HLA-A03:01 | ADAD1 | Testis | 400 |
| CLYMNQLPK | HLA-A03:01 | ADAD1 | Testis | 401 |
| GMSMASRLCK | HLA-A03:01 | ADAD1 | Testis | 402 |
| RVDDALTSK | HLA-A03:01 | ADAD1 | Testis | 403 |
| AVVDGIQYK | HLA-A03:01 | ADAD1 | Testis | 404 |
| MSMASRLCK | HLA-A11:01 | ADAD1 | Testis | 405 |
| SISNPVLPPK | HLA-A11:01 | ADAD1 | Testis | 406 |
| AVVDGIQYK | HLA-A11:01 | ADAD1 | Testis | 407 |
| SSLAAFIIER | HLA-A11:01 | ADAD1 | Testis | 408 |
| VVLSELAYVSK | HLA-A11:01 | ADAD1 | Testis | 409 |
| RYFYRQLLLF | HLA-A24:02 | ADAD1 | Testis | 410 |
| RYFYRQLLL | HLA-A24:02 | ADAD1 | Testis | 411 |
| YFYRQLLLF | HLA-A24:02 | ADAD1 | Testis | 412 |
| KYSSSLAAF | HLA-A24:02 | ADAD1 | Testis | 413 |
| MSMASRLCK | HLA-A30:01 | ADAD1 | Testis | 414 |
| LSRFNLLAK | HLA-A30:01 | ADAD1 | Testis | 415 |
| TARRSLLSK | HLA-A30:01 | ADAD1 | Testis | 416 |
| AVVDGIQYK | HLA-A30:01 | ADAD1 | Testis | 417 |
| KIPKEFIMK | HLA-A30:01 | ADAD1 | Testis | 418 |
| RQLLLFYSK | HLA-A30:01 | ADAD1 | Testis | 419 |
| DTHAVVTAR | HLA-A33:03 | ADAD1 | Testis | 420 |
| YVSKVHYEGR | HLA-A33:03 | ADAD1 | Testis | 421 |
| RSLLRYFYR | HLA-A33:03 | ADAD1 | Testis | 422 |
| RFNQLISNR | HLA-A33:03 | ADAD1 | Testis | 423 |
| ERFNQLISNR | HLA-A33:03 | ADAD1 | Testis | 424 |
| SPFKSGMSM | HLA-B07:02 | ADAD1 | Testis | 425 |
| SSPFKSGMSM | HLA-B07:02 | ADAD1 | Testis | 426 |
| QPVYISSIL | HLA-B07:02 | ADAD1 | Testis | 427 |
| IGPYFAFCAV | HLA-B07:02 | ADAD1 | Testis | 428 |
| FPAEPVVL | HLA-B07:02 | ADAD1 | Testis | 429 |
| IVKERFNQL | HLA-B08:01 | ADAD1 | Testis | 430 |
| NLEYKFLSL | HLA-B08:01 | ADAD1 | Testis | 431 |
| AMLSRFNLL | HLA-B08:01 | ADAD1 | Testis | 432 |
| DIKPDGRVL | HLA-B08:01 | ADAD1 | Testis | 433 |
| SELAYVSKV | HLA-B13:02 | ADAD1 | Testis | 434 |
| VEGKIYLTV | HLA-B13:02 | ADAD1 | Testis | 435 |
| FAFCAVVDGI | HLA-B13:02 | ADAD1 | Testis | 436 |
| AQGDVSLEI | HLA-B13:02 | ADAD1 | Testis | 437 |
| HQFAQMQRV | HLA-B13:02 | ADAD1 | Testis | 438 |
| QQHGYGSWI | HLA-B13:02 | ADAD1 | Testis | 439 |
| FQSSQVPSF | HLA-B46:01 | ADAD1 | Testis | 440 |
| LTSKLPMFY | HLA-B46:01 | ADAD1 | Testis | 441 |
| LSHFIQPVY | HLA-B46:01 | ADAD1 | Testis | 442 |
| AAKCMSASY | HLA-B46:01 | ADAD1 | Testis | 443 |
| IPKEFIMKY | HLA-B46:01 | ADAD1 | Testis | 444 |
| EAKCKLKSY | HLA-B46:01 | ADAD1 | Testis | 445 |
| SAYPLQMNL | HLA-C01:02 | ADAD1 | Testis | 446 |
| YSSSLAAFI | HLA-C01:02 | ADAD1 | Testis | 447 |
| SLVPSAYPL | HLA-C01:02 | ADAD1 | Testis | 448 |
| QVPSFAQML | HLA-C01:02 | ADAD1 | Testis | 449 |
| SSPFKSGMSM | HLA-C01:02 | ADAD1 | Testis | 450 |
| AEPVVLSEL | HLA-C01:02 | ADAD1 | Testis | 451 |
| SAYPLQMNL | HLA-C03:04 | ADAD1 | Testis | 452 |
| SAFEANEEL | HLA-C03:04 | ADAD1 | Testis | 453 |
| VAVEGKIYL | HLA-C03:04 | ADAD1 | Testis | 454 |
| FAQMQRVQL | HLA-C03:04 | ADAD1 | Testis | 455 |
| FYSKNPAMM | HLA-C04:01 | ADAD1 | Testis | 456 |
| RYFYRQLLL | HLA-C04:01 | ADAD1 | Testis | 457 |
| YSSSLAAFI | HLA-C04:01 | ADAD1 | Testis | 458 |
| PFPAEPVVL | HLA-C04:01 | ADAD1 | Testis | 459 |
| ALDELLQL | HLA-C04:01 | ADAD1 | Testis | 460 |
| LRYFYRQLL | HLA-C07:01 | ADAD1 | Testis | 461 |
| LRYFYRQLLL | HLA-C07:01 | ADAD1 | Testis | 462 |
| RYFYRQLLL | HLA-C07:01 | ADAD1 | Testis | 463 |
| TRWEVLGVQ | HLA-C07:01 | ADAD1 | Testis | 464 |
| LRYFYRQL | HLA-C07:01 | ADAD1 | Testis | 465 |
| RRSLLRYF | HLA-C07:01 | ADAD1 | Testis | 466 |
| LRYFYRQLL | HLA-C07:02 | ADAD1 | Testis | 467 |
| RYFYRQLLL | HLA-C07:02 | ADAD1 | Testis | 468 |
| FYSKNPAMM | HLA-C07:02 | ADAD1 | Testis | 469 |
| IKPDGRVL | HLA-C07:02 | ADAD1 | Testis | 470 |
| HYEGRHIQY | HLA-C07:02 | ADAD1 | Testis | 471 |
| YADQVNIDY | HLA-A01:01 | AKAP4 | Testis | 472 |
| FADSISKGLMVY | HLA-A01:01 | AKAP4 | Testis | 473 |
| YSVYADQVNIDY | HLA-A01:01 | AKAP4 | Testis | 474 |
| SSENCYSVY | HLA-A01:01 | AKAP4 | Testis | 475 |
| CSIDDLSFY | HLA-A01:01 | AKAP4 | Testis | 476 |
| YSDTTMMSD | HLA-A01:01 | AKAP4 | Testis | 477 |
| ASQFNVPMLY | HLA-A01:01 | AKAP4 | Testis | 478 |
| SIDDLSFYV | HLA-A02:01 | AKAP4 | Testis | 479 |
| VLMTDSDFV | HLA-A02:01 | AKAP4 | Testis | 480 |
| MMSDDIDWL | HLA-A02:01 | AKAP4 | Testis | 481 |
| GQLEKLPQV | HLA-A02:01 | AKAP4 | Testis | 482 |
| YLMNRPQNL | HLA-A02:01 | AKAP4 | Testis | 483 |
| LLDWLLANL | HLA-A02:01 | AKAP4 | Testis | 484 |
| FIDKLVESV | HLA-A02:01 | AKAP4 | Testis | 485 |
| GLMVYANQV | HLA-A02:01 | AKAP4 | Testis | 486 |
| KLVESVMKL | HLA-A02:01 | AKAP4 | Testis | 487 |
| QLLDWLLANL | HLA-A02:01 | AKAP4 | Testis | 488 |
| VLMTDSDFVSAV | HLA-A02:01 | AKAP4 | Testis | 420 |
| MDMSNIVLML | HLA-A02:01 | AKAP4 | Testis | 490 |
| WIAASQFNV | HLA-A02:01 | AKAP4 | Testis | 491 |
| ALAELEEQA | HLA-A02:01 | AKAP4 | Testis | 492 |
| SLEEKEIIV | HLA-A02:01 | AKAP4 | Testis | 493 |
| SLQKQLQAV | HLA-A02:01 | AKAP4 | Testis | 494 |
| ALAELEEQAA | HLA-A02:01 | AKAP4 | Testis | 495 |
| YQDSLGHEV | HLA-A02:01 | AKAP4 | Testis | 496 |
| RISPRTPASK | HLA-A03:01 | AKAP4 | Testis | 497 |
| MMVSLMKTLK | HLA-A03:01 | AKAP4 | Testis | 498 |
| FLYSELSNK | HLA-A03:01 | AKAP4 | Testis | 499 |
| SFLYSELSNK | HLA-A03:01 | AKAP4 | Testis | 500 |
| VMKLCLIMAK | HLA-A03:01 | AKAP4 | Testis | 501 |
| KLLNENPFK | HLA-A03:01 | AKAP4 | Testis | 502 |
| ALSPSTSTCK | HLA-A03:01 | AKAP4 | Testis | 503 |
| SQFNVPMLY | HLA-A03:01 | AKAP4 | Testis | 504 |
| ASDMMVSLMK | HLA-A11:01 | AKAP4 | Testis | 505 |
| SQSLSYASLK | HLA-A11:01 | AKAP4 | Testis | 506 |
| ATDIMEAMLK | HLA-A11:01 | AKAP4 | Testis | 507 |
| QSLSYASLK | HLA-A11:01 | AKAP4 | Testis | 508 |
| SSLVIQMAHK | HLA-A11:01 | AKAP4 | Testis | 509 |
| SVMKLCLIMAK | HLA-A11:01 | AKAP4 | Testis | 510 |
| SICPSPGNK | HLA-A11:01 | AKAP4 | Testis | 511 |
| ASANKPNFR | HLA-A11:01 | AKAP4 | Testis | 512 |
| VVLKRVLLR | HLA-A11:01 | AKAP4 | Testis | 513 |
| SVLNWLLSDLQK | HLA-A11:0] | AKAP4 | Testis | 514 |
| FYVNRLSSL | HLA-A24:02 | AKAP4 | Testis | 515 |
| KYALGFQHAL | HLA-A24:02 | AKAP4 | Testis | 516 |
| SQFNVPMLYF | HLA-A24:02 | AKAP4 | Testis | 517 |
| SFYVNRLSSL | HLA-A24:02 | AKAP4 | Testis | 518 |
| FYVNRLSSLV | HLA-A24:02 | AKAP4 | Testis | 519 |
| VYADQVNIDYL | HLA-A24:02 | AKAP4 | Testis | 520 |
| KYSNDGAAL | HLA-A24:02 | AKAP4 | Testis | 521 |
| QFNVPMLYF | HLA-A24:02 | AKAP4 | Testis | 522 |
| NYQDSLGHEVI | HLA-A24:02 | AKAP4 | Testis | 523 |
| VYADQVNI | HLA-A24:02 | AKAP4 | Testis | 524 |
| KSKCLHHSI | HLA-A30:01 | AKAP4 | Testis | 525 |
| RGTRCIHSGA | HLA-A30:01 | AKAP4 | Testis | 526 |
| GTRCIHSGA | HLA-A30:01 | AKAP4 | Testis | 527 |
| KTLKVHSSGK | HLA-A30:01 | AKAP4 | Testis | 528 |
| ASMSNRSDK | HLA-A30:01 | AKAP4 | Testis | 529 |
| KERDKGKMK | HLA-A30:01 | AKAP4 | Testis | 530 |
| GDKDGQLEK | HLA-A30:01 | AKAP4 | Testis | 531 |
| HTKEIVSDI | HLA-A30:01 | AKAP4 | Testis | 532 |
| RQPDEAVGK | HLA-A30:01 | AKAP4 | Testis | 533 |
| KEFADSISK | HLA-A30:01 | AKAP4 | Testis | 534 |
| EVMKFAKER | HLA-A33:03 | AKAP4 | Testis | 535 |
| MMSDDIDWLR | HLA-A33:03 | AKAP4 | Testis | 536 |
| DIDWLRSHR | HLA-A33:03 | AKAP4 | Testis | 537 |
| SVKQLESHR | HLA-A33:03 | AKAP4 | Testis | 538 |
| YLMNRPQNLR | HLA-A33:03 | AKAP4 | Testis | 539 |
| DDLSFYVNR | HLA-A33:03 | AKAP4 | Testis | 540 |
| VNIDYLMNR | HLA-A33:03 | AKAP4 | Testis | 541 |
| EAVGKVAR | HLA-A33:03 | AKAP4 | Testis | 542 |
| DFVSAVKR | HLA-A33:03 | AKAP4 | Testis | 543 |
| RPQNLRLEM | HLA-B07:02 | AKAP4 | Testis | 544 |
| SPRTPASKI | HLA-B07:02 | AKAP4 | Testis | 545 |
| KPIPASVVL | HLA-B07:02 | AKAP4 | Testis | 546 |
| APSDPVSVL | HLA-B07:02 | AKAP4 | Testis | 547 |
| INRPQNERLEM | HLA-B07:02 | AKAP4 | Testis | 548 |
| TPASKIASEM | HLA-B07:02 | AKAP4 | Testis | 549 |
| MLKRLVSAL | HLA-B08:01 | AKAP4 | Testis | 550 |
| YLMNRPQNL | HLA-B08:01 | AKAP4 | Testis | 551 |
| AMLKRLVSAL | HLA-B08:01 | AKAP4 | Testis | 552 |
| MEAMLKRLVSAL | HLA-B08:01 | AKAP4 | Testis | 553 |
| YVNRLSSL | HLA-B08:01 | AKAP4 | Testis | 554 |
| HDPKCRNQSL | HLA-B08:01 | AKAP4 | Testis | 555 |
| DPKCRNQSL | HLA-B08:01 | AKAP4 | Testis | 556 |
| EHILKEGL | HLA-B08:01 | AKAP4 | Testis | 557 |
| SDLQKYAL | HLA-B08:01 | AKAP4 | Testis | 558 |
| MAYEAVEL | HLA-B08:01 | AKAP4 | Testis | 559 |
| MDMSNIVLMLI | HLA-B13:02 | AKAP4 | Testis | 560 |
| MDMSNIVLML | HLA-B13:02 | AKAP4 | Testis | 561 |
| MSNIVLMLL | HLA-B13:02 | AKAP4 | Testis | 562 |
| MDMSNIVLM | HLA-B13:02 | AKAP4 | Testis | 563 |
| KMDMSNIVLMLI | HLA-B13:02 | AKAP4 | Testis | 564 |
| HILKEGLTI | HLA-B13:02 | AKAP4 | Testis | 565 |
| YQDSLGHEV | HLA-B13:02 | AKAP4 | Testis | 566 |
| GQQDQDRKV | HLA-B13:02 | AKAP4 | Testis | 567 |
| RSHRQVCKV | HLA-B13:02 | AKAP4 | Testis | 568 |
| GQSAKALSV | HLA-B13:02 | AKAP4 | Testis | 569 |
| MAYSDTTMM | HLA-B46:01 | AKAP4 | Testis | 570 |
| MMAYSDTTM | HLA-B46:01 | AKAP4 | Testis | 571 |
| YANQVASDM | HLA-B46:01 | AKAP4 | Testis | 572 |
| CSIDDLSFY | HLA-B46:01 | AKAP4 | Testis | 573 |
| YALGFQHAL | HLA-B46:01 | AKAP4 | Testis | 574 |
| VASDMMVSL | HLA-B46:01 | AKAP4 | Testis | 575 |
| LAKDLIVSA | HLA-B46:01 | AKAP4 | Testis | 576 |
| SGKPIPASV | HLA-B46:01 | AKAP4 | Testis | 577 |
| YSNDGAAL | HLA-B46:01 | AKAP4 | Testis | 578 |
| MMAYSDTTM | HLA-C01:02 | AKAP4 | Testis | 579 |
| YALGFQHAL | HLA-C01:02 | AKAP4 | Testis | 580 |
| YLMNRPQNL | HLA-C01:02 | AKAP4 | Testis | 581 |
| KMDMSNIVL | HLA-C01:02 | AKAP4 | Testis | 582 |
| VASDMMVSL | HLA-C01:02 | AKAP4 | Testis | 583 |
| ISPDGECSI | HLA-C01:02 | AKAP4 | Testis | 584 |
| QAPSDPVSVL | HLA-C01:02 | AKAP4 | Testis | 585 |
| QAPSDPVSV | HLA-C01:02 | AKAP4 | Testis | 586 |
| YSNDGAAL | HLA-C01:02 | AKAP4 | Testis | 587 |
| AMPQNYQDSL | HLA-C01:02 | AKAP4 | Testis | 588 |
| MAYSDTTMM | HLA-C03:04 | AKAP4 | Testis | 589 |
| YALGFQHAL | HLA-C03:04 | AKAP4 | Testis | 590 |
| VASDMMVSL | HLA-C03:04 | AKAP4 | Testis | 591 |
| YANQVASDM | HLA-C03:04 | AKAP4 | Testis | 592 |
| AASQFNVPM | HLA-C03:04 | AKAP4 | Testis | 593 |
| MAYEAVEL | HLA-C03:04 | AKAP4 | Testis | 594 |
| FADSISKGL | HLA-C03:04 | AKAP4 | Testis | 595 |
| YSNDGAAL | HLA-C03:04 | AKAP4 | Testis | 596 |
| YQDSLGHEV | HLA-C04:01 | AKAP4 | Testis | 597 |
| YLMNRPQNL | HLA-C04:01 | AKAP4 | Testis | 598 |
| ASDMMVSLM | HLA-C04:01 | AKAP4 | Testis | 599 |
| FADSISKGL | HLA-C04:01 | AKAP4 | Testis | 600 |
| SIDDLSFYV | HLA-C04:01 | AKAP4 | Testis | 601 |
| KMDMSNIVI | HLA-C04:01 | AKAP4 | Testis | 602 |
| ATDIMEAML | HLA-C04:01 | AKAP4 | Testis | 603 |
| QFNVPMLYF | HLA-C04:01 | AKAP4 | Testis | 604 |
| LLDWLLANL | HLA-C04:01 | AKAP4 | Testis | 605 |
| FVDVSTLNV | HLA-C04:01 | AKAP4 | Testis | 606 |
| KMDMSNIVLM | HLA-C04:01 | AKAP4 | Testis | 607 |
| FYVNRLSSL | HLA-C07:01 | AKAP4 | Testis | 608 |
| YLMNRPQNL | HLA-C07:01 | AKAP4 | Testis | 609 |
| MAYSDTTMM | HLA-C07:01 | AKAP4 | Testis | 610 |
| NRPQNLRLEM | HLA-C07:01 | AKAP4 | Testis | 611 |
| SQFNVPMLY | HLA-C07:01 | AKAP4 | Testis | 612 |
| CRNQSLEF | HLA-C07:01 | AKAP4 | Testis | 613 |
| HRAPGPSTC | HLA-C07:01 | AKAP4 | Testis | 614 |
| SREGGQKSF | HLA-C07:01 | AKAP4 | Testis | 615 |
| HRGVCKVDL | HLA-C07:01 | AKAP4 | Testis | 616 |
| APSDPVSVL | HLA-C07:01 | AKAP4 | Testis | 617 |
| FYVNRLSSL | HLA-C07:02 | AKAP4 | Testis | 618 |
| YLMNRPQNL | HLA-C07:02 | AKAP4 | Testis | 619 |
| SFYVNRLSSL | HLA-C07:02 | AKAP4 | Testis | 620 |
| MAYSDTTMM | HLA-C07:02 | AKAP4 | Testis | 621 |
| NRPQNLRLEM | HLA-C07:02 | AKAP4 | Testis | 622 |
| FYVNRLSSLV | HLA-C07:02 | AKAP4 | Testis | 623 |
| HRAPGPSTC | HLA-C07:02 | AKAP4 | Testis | 624 |
| NRPQNLRL | HLA-C07:02 | AKAP4 | Testis | 625 |
| KYSNDGAAL | HLA-C07:02 | AKAP4 | Testis | 626 |
| MTEAALLLL | HLA-A01:01 | ALPPL2 | Uterine | 627 |
| FLAMDRFPY | HLA-A01:01 | ALPPL2 | Uterine | 628 |
| WLAKHQGARY | HLA-A01:01 | ALPPL2 | Uterine | 629 |
| MTEAALLL | HLA-A01:01 | ALPPL2 | Uterine | 630 |
| RTELLQASL | HLA-A01:01 | ALPPL2 | Uterine | 631 |
| FLAMDRFPYV | HLA-A02:01 | ALPPL2 | Uterine | 632 |
| TFLAMDRFPYV | HLA-A02:01 | ALPPL2 | Uterine | 633 |
| ETFLAMDRFPYV | HLA-A02:01 | ALPPL2 | Uterine | 634 |
| FLAMDRFPYVA | HLA-A02:01 | ALPPL2 | Uterine | 635 |
| FLAMDRFPYVAL | HLA-A02:01 | ALPPL2 | Uterine | 636 |
| TFLAMDRFPYVA | HLA-A02:01 | ALPPL2 | Uterine | 637 |
| YVWNRTELL | HLA-A02:01 | ALPPL2 | Uterine | 638 |
| LLQASLDPSV | HLA-A02:01 | ALPPL2 | Uterine | 639 |
| SLMEMTEAALLL | HLA-A02:01 | ALPPL2 | Uterine | 640 |
| SLMEMTEAALL | HLA-A02:01 | ALPPL2 | Uterine | 641 |
| KLGPETFLA | HLA-A02:01 | ALPPL2 | Uterine | 642 |
| LLLLGTATA | HLA-A02:01 | ALPPL2 | Uterine | 643 |
| KLGPETFL | HLA-A02:01 | ALPPL2 | Uterine | 644 |
| ALSKTYSV | HLA-A02:01 | ALPPL2 | Uterine | 645 |
| ALSKTYSVDK | HLA-A03:01 | ALPPL2 | Uterine | 646 |
| GAYAHTVNR | HLA-A03:01 | ALPPL2 | Uterine | 647 |
| AGAYAHTVNR | HLA-A03:01 | ALPPL2 | Uterine | 648 |
| KLGPETFLAM | HLA-A03:01 | ALPPL2 | Uterine | 649 |
| ALLLLSRNPR | HLA-A03:01 | ALPPL2 | Uterine | 650 |
| GAYAHTVNR | HLA-A11:01 | ALPPL2 | Uterine | 651 |
| AGAYAHTVNR | HLA-A11:01 | ALPPL2 | Uterine | 652 |
| ALSKTYSVDK | HLA-A11:01 | ALPPL2 | Uterine | 653 |
| AALLLLSR | HLA-A11:01 | ALPPL2 | Uterine | 654 |
| EAALLLLSR | HLA-A11:01 | ALPPL2 | Uterine | 655 |
| RYVWNRTELL | HLA-A24:02 | ALPPL2 | Uterine | 656 |
| AYAHTVNRNW | HLA-A24:02 | ALPPL2 | Uterine | 657 |
| ARYVWNRTELL | HLA-A24:02 | ALPPL2 | Uterine | 658 |
| VWNRTELL | HLA-A24:02 | ALPPL2 | Uterine | 659 |
| TFLAMDRF | HLA-A24:02 | ALPPL2 | Uterine | 660 |
| LSKTYSVDK | HLA-A30:01 | ALPPL2 | Uterine | 661 |
| RVQHASPAGA | HLA-A30:01 | ALPPL2 | Uterine | 662 |
| GAYAHTVNR | HLA-A30:01 | ALPPL2 | Uterine | 663 |
| ALSKTYSVDK | HLA-A30:01 | ALPPL2 | Uterine | 664 |
| KTYSVDKHV | HLA-A30:01 | ALPPL2 | Uterine | 665 |
| AAHPGPSVV | HLA-A30:01 | ALPPL2 | Uterine | 666 |
| YTACDLAPR | HLA-A33:03 | ALPPL2 | Uterine | 667 |
| LLLLSRNPR | HLA-A33:03 | ALPPL2 | Uterine | 668 |
| GAYAHTVNR | HLA-A33:03 | ALPPL2 | Uterine | 669 |
| EAALLLLSR | HLA-A33:03 | ALPPL2 | Uterine | 670 |
| ETFLAMDR | HLA-A33:03 | ALPPL2 | Uterine | 671 |
| APRAGTTDAA | HLA-B07:02 | ALPPL2 | Uterine | 672 |
| APRAGTTDA | HLA-B07:02 | ALPPL2 | Uterine | 673 |
| HPGPSVVPAL | HLA-B07:02 | ALPPL2 | Uterine | 674 |
| GPSVVPALL | HLA-B07:02 | ALPPL2 | Uterine | 675 |
| FLAMDRFPYV | HLA-B08:01 | ALPPL2 | Uterine | 676 |
| FPYVALSKTYSV | HLA-B08:01 | ALPPL2 | Uterine | 677 |
| VALSKTYSV | HLA-B08:01 | ALPPL2 | Uterine | 678 |
| YVWNRTELL | HLA-B08:01 | ALPPL2 | Uterine | 679 |
| TELLQASL | HLA-B08:01 | ALPPL2 | Uterine | 680 |
| MEMTEAALLL | HLA-B13:02 | ALPPL2 | Uterine | 681 |
| MEMTEAALL | HLA-B13:02 | ALPPL2 | Uterine | 682 |
| MEMTEAALLLL | HLA-B13:02 | ALPPL2 | Uterine | 683 |
| RQAAEALGA | HLA-B13:02 | ALPPL2 | Uterine | 684 |
| ALSKTYSV | HLA-B13:02 | ALPPL2 | Uterine | 685 |
| AAHPQPSVV | HLA-B13:02 | ALPPL2 | Uterine | 686 |
| FLAMDRFPY | HLA-B46:01 | ALPPL2 | Uterine | 687 |
| FLAMDRFPYV | HLA-B46:01 | ALPPL2 | Uterine | 688 |
| YVWNRTELL | HLA-B46:01 | ALPPL2 | Uterine | 689 |
| AAHPGPSVV | HLA-B46:01 | ALPPL2 | Uterine | 690 |
| AAHPGPSV | HLA-B46:01 | ALPPL2 | Uterine | 691 |
| LAKHQGARY | HLA-B46:01 | ALPPL2 | Uterine | 692 |
| YVWNRTELL | HLA-C01:02 | ALPPL2 | Uterine | 693 |
| LGPETFLAM | HLA-C01:02 | ALPPL2 | Uterine | 694 |
| MTEAALLLL | HLA-C01:02 | ALPPL2 | Uterine | 695 |
| PGPSVVPAL | HLA-C01:02 | ALPPL2 | Uterine | 696 |
| LAPRAGTTD | HLA-C01:02 | ALPPL2 | Uterine | 697 |
| AAHPGPSVV | HLA-C03:04 | ALPPL2 | Uterine | 698 |
| YVWNRTELL | HLA-C03:04 | ALPPL2 | Uterine | 699 |
| FLAMDRFPYV | HLA-C03:04 | ALPPL2 | Uterine | 700 |
| AAHPGPSV | HLA-C03:04 | ALPPL2 | Uterine | 701 |
| DAAHPGPSV | HLA-C03:04 | ALPPL2 | Uterine | 702 |
| YVWNRTELL | HLA-C04:01 | ALPPL2 | Uterine | 703 |
| FLAMDRFPYV | HLA-C04:01 | ALPPL2 | Uterine | 704 |
| MTEAALLLL | HLA-C04:01 | ALPPL2 | Uterine | 705 |
| VWNRTELL | HLA-C04:01 | ALPPL2 | Uterine | 706 |
| KLGPETFL | HLA-C04:01 | ALPPL2 | Uterine | 707 |
| YVWNRTELL | HLA-C07:01 | ALPPL2 | Uterine | 708 |
| FLAMDRFPYV | HLA-C07:01 | ALPPL2 | Uterine | 709 |
| ARYVWNRTELL | HLA-C07:01 | ALPPL2 | Uterine | 710 |
| HPGPSVVP | HLA-C07:01 | ALPPL2 | Uterine | 711 |
| YSVDKHVP | HLA-C07:01 | ALPPL2 | Uterine | 712 |
| HPGPSVVPA | HLA-C07:01 | ALPPL2 | Uterine | 713 |
| YVWNRTELL | HLA-C07:02 | ALPPL2 | Uterine | 714 |
| RYVWNRTELL | HLA-C07:02 | ALPPL2 | Uterine | 715 |
| FLAMDRFPYV | HLA-C07:02 | ALPPL2 | Uterine | 716 |
| NRTELLQASL | HLA-C07:02 | ALPPL2 | Uterine | 717 |
| LGPETFLAM | HLA-C07:02 | ALPPL2 | Uterine | 718 |
| PGPSVVPAL | HLA-C07:02 | ALPPL2 | Uterine | 719 |
| VSPPNENVAIY | HLA-A01:01 | AMY2A | Pancreas | 720 |
| NNDDWSFSL | HLA-A01:01 | AMY2A | Pancreas | 721 |
| FNNDDWSFSL | HLA-A01:01 | AMY2A | Pancreas | 722 |
| LIGLLDLAL | HLA-A01:01 | AMY2A | Pancreas | 723 |
| YVDAVINHMC | HLA-A01:01 | AMY2A | Pancreas | 724 |
| RLTGLLDLAL | HLA-A02:01 | AMY2A | Pancreas | 725 |
| IVFNNDDWSPSL | HLA-A02:01 | AMY2A | Pancreas | 726 |
| RLTGLLDLA | HLA-A02:01 | AMY2A | Pancreas | 727 |
| YLKNWGEGWGFV | HLA-A02:01 | AMY2A | Pancreas | 728 |
| FVPSDRALVFV | HLA-A02:01 | AMY2A | Pancreas | 729 |
| FVPSDRALV | HLA-A02:01 | AMY2A | Pancreas | 730 |
| AVINHMCGNAV | HLA-A02:01 | AMY2A | Pancreas | 731 |
| AVINHMQGNA | HLA-A02:01 | AMY2A | Pancreas | 732 |
| NMVIFRNVV | HLA-A02:01 | AMY2A | Pancreas | 733 |
| HMCGNAVSA | HLA-A02:01 | AMY2A | Pancreas | 734 |
| RLTGLLDL | HLA-A02:01 | AMY2A | Pancreas | 735 |
| VPSDRALVFV | HLA-A02:01 | AMY2A | Pancreas | 736 |
| FNNDDWSFSL | HLA-A02:01 | AMY2A | Pancreas | 737 |
| NNDDWSFSL | HLA-A02:01 | AMY2A | Pancreas | 738 |
| NWGEGWGFV | HLA-A02:01 | AMY2A | Pancreas | 739 |
| RQIRNMVIFR | HLA-A03:01 | AMY2A | Pancreas | 740 |
| TGLLDLALEK | HLA-A03:01 | AMY2A | Pancreas | 141 |
| RLTGLLDLALEK | HLA-A03:01 | AMY2A | Pancreas | 742 |
| AIYNPFRPW | HLA-A03:01 | AMY2A | Pancreas | 743 |
| QIRNMVIFR | HLA-A03:01 | AMY2A | Pancreas | 744 |
| AIYNPFRPWW | HLA-A03:01 | AMY2A | Pancreas | 745 |
| TQLLDLALEK | HLA-A11:01 | AMY2A | Pancreas | 746 |
| RQIRNMVIFR | HLA-A11:01 | AMY2A | Pancreas | 747 |
| LTGLLDLALEK | HLA-A11:01 | AMY2A | Pancreas | 748 |
| ATYNPFRPWWER | HLA-A11:01 | AMY2A | Pancreas | 749 |
| AIYNPFRPW | HLA-A11:01 | AMY2A | Pancreas | 750 |
| QVIDLGGEPIK | HLA-A11:01 | AMY2A | Pancreas | 751 |
| NVAIYNPFR | HLA-A11:01 | AMY2A | Pancreas | 752 |
| TYNPFRPWW | HLA-A24:02 | AMY2A | Pancreas | 753 |
| VFNNDDWSF | HLA-A24:02 | AMY2A | Pancreas | 754 |
| RQIRNMVIF | HLA-A24:02 | AMY2A | Pancreas | 755 |
| NYNDATQVI | HLA-A24:02 | AMY2A | Pancreas | 756 |
| RWRQIRNMVI | HLA-A30:01 | AMY2A | Pancreas | 757 |
| RQIRNMVIFR | HLA-A30:01 | AMY2A | Pancreas | 758 |
| QVRDCRLTG | HLA-A30:01 | AMY2A | Pancreas | 759 |
| RNMVIFRNV | HLA-A30:01 | AMY2A | Pancreas | 760 |
| AIYNPFRPW | HLA-A30:01 | AMY2A | Pancreas | 761 |
| WSFSLTLQT | HLA-A30:01 | AMY2A | Pancreas | 762 |
| QIRNMVIFR | HLA-A33:03 | AMY2A | Pancreas | 763 |
| NVAIYNPFR | HLA-A33:03 | AMY2A | Pancreas | 764 |
| YNPFRPWWER | HLA-A33:03 | AMY2A | Pancreas | 765 |
| YNPFRPWWER | HLA-A33:03 | AMY2A | Pancreas | 766 |
| VPSDRALVF | HLA-B07:02 | AMY2A | Pancreas | 767 |
| FVPSDRALVF | HLA-B07:02 | AMY2A | Pancreas | 768 |
| QVRDCRLTGL | HLA-B07:02 | AMY2A | Pancreas | 769 |
| VPSDRALV | HLA-B07:02 | AMY2A | Pancreas | 770 |
| VPSDRALVFV | HLA-B07:02 | AMY2A | Pancreas | 771 |
| WRQIRNMVI | HLA-B08:01 | AMY2A | Pancreas | 772 |
| WRQIRNMVIF | HLA-B08:01 | AMY2A | Pancreas | 773 |
| QVRDCRLTGL | HLA-B08:01 | AMY2A | Pancreas | 774 |
| DATQVIDI | HLA-B08:01 | AMY2A | Pancreas | 775 |
| VPSDRALVF | HLA-B08:01 | AMY2A | Pancreas | 776 |
| TGLLDLAL | HLA-B08:01 | AMY2A | Pancreas | 777 |
| RNMVIFRNV | HLA-B13:02 | AMY2A | Pancreas | 778 |
| FNNDDWSFSLTL | HLA-B13:02 | AMY2A | Pancreas | 779 |
| NDDWSFSLTL | HLA-B13:02 | AMY2A | Pancreas | 780 |
| RQIRNMVI | HLA-B13:02 | AMY2A | Pancreas | 781 |
| RQIRNMVIF | HLA-B13:02 | AMY2A | Pancreas | 782 |
| RLTGLLDL | HLA-B13:02 | AMY2A | Pancreas | 783 |
| FVPSDRALVF | HLA-B46:01 | AMY2A | Pancreas | 784 |
| RQIRNMVIF | HLA-B46:01 | AMY2A | Pancreas | 785 |
| AIYNPFRPW | HLA-B46:01 | AMY2A | Pancreas | 786 |
| VFNNDDWSF | HLA-B46:01 | AMY2A | Pancreas | 787 |
| FNNDDWSF | HLA-B46:01 | AMY2A | Pancreas | 788 |
| FVPSDRALV | HLA-C01:02 | AMY2A | Pancreas | 789 |
| FVPSDRALVF | HLA-C01:02 | AMY2A | Pancreas | 790 |
| LTGLLDLAL | HLA-C01:02 | AMY2A | Pancreas | 791 |
| FVPSDRAL | HLA-C01:02 | AMY2A | Pancreas | 792 |
| FVPSDRALVF | HLA-C03:04 | AMY2A | Pancreas | 793 |
| VPSDRALVF | HLA-C03:04 | AMY2A | Pancreas | 794 |
| FVPSDRALV | HLA-C03:04 | AMY2A | Pancreas | 795 |
| AIYNPFRPW | HLA-C03:04 | AMY2A | Pancreas | 796 |
| FVPSDRAL | HLA-C03:04 | AMY2A | Pancreas | 797 |
| GFVPSDRAL | HLA-C03:04 | AMY2A | Pancreas | 798 |
| NYNDATQVI | HLA-C04:01 | AMY2A | Pancreas | 799 |
| FVPSDRALVF | HLA-C04:01 | AMY2A | Pancreas | 800 |
| WRQIRNMVI | HLA-C04:01 | AMY2A | Pancreas | 801 |
| VFNNDDWSF | HLA-C04:01 | AMY2A | Pancreas | 802 |
| NNDDWSFSL | HLA-C04:01 | AMY2A | Pancreas | 803 |
| WRQIRNMVI | HLA-C07:01 | AMY2A | Pancreas | 804 |
| CRLTGLLDL | HLA-C07:01 | AMY2A | Pancreas | 805 |
| NYNDATQVI | HLA-C07:01 | AMY2A | Pancreas | 806 |
| IRNMVIFRN | HLA-C07:01 | AMY2A | Pancreas | 807 |
| CRLTGLLD | HLA-C07:01 | AMY2A | Pancreas | 808 |
| NNDDWSFSL | HLA-C07:01 | AMY2A | Pancreas | 809 |
| WRQIRNMVI | HLA-C07:02 | AMY2A | Pancreas | 810 |
| CRLTQLLDL | HLA-C07:02 | AMY2A | Pancreas | 811 |
| NYNDATQVI | HLA-C07:02 | AMY2A | Pancreas | 812 |
| FVPSDRAL | HLA-C07:02 | AMY2A | Pancreas | 813 |
| VPSDRALVF | HLA-C07:02 | AMY2A | Pancreas | 814 |
| MNVDVSSTIY | HLA-A01:01 | ANKRD30A | Breast | 815 |
| NVDVSSTIY | HLA-A01:01 | ANKRD30A | Breast | 816 |
| LVDVYGNTALHY | HLA-A01:01 | ANKRD30A | Breast | 817 |
| KMNVDVSSTIY | HLA-A01:01 | ANKRD30A | Breast | 818 |
| GADINLVDVY | HLA-A01:01 | ANKRD30A | Breast | 819 |
| RKMNVDVSSTIY | HLA-A01:01 | ANKRD30A | Breast | 820 |
| PSESKQKDY | HLA-A01:01 | ANKRD30A | Breast | 821 |
| TIDIHFLER | HLA-A01:01 | ANKRD30A | Breast | 822 |
| YSCDSRSLF | HLA-A01:01 | ANKRD30A | Breast | 823 |
| YLLHENCML | HLA-A02:01 | ANKRD30A | Breast | 824 |
| AVYSEILSV | HLA-A02:01 | ANKRD30A | Breast | 825 |
| SLSKILDTV | HLA-A02:01 | ANKRD30A | Breast | 826 |
| SLDQKLFQL | HLA-A02:01 | ANKRD30A | Breast | 827 |
| SLIPLLLSI | HLA-A02:01 | ANKRD30A | Breast | 828 |
| YAVYSEILSV | HLA-A02:01 | ANKRD30A | Breast | 829 |
| NMWLQQQLV | HLA-A02:01 | ANKRD30A | Breast | 830 |
| LLSHGAVIEV | HLA-A02:01 | ANKRD30A | Breast | 831 |
| SLFESSAKI | HLA-A02:01 | ANKRD30A | Breast | 832 |
| KLLSHGAVIEV | HLA-A02:01 | ANKRD30A | Breast | 833 |
| FLKAPCRMKV | HLA-A02:01 | ANKRD30A | Breast | 834 |
| FLLIKNANA | HLA-A02:01 | ANKRD30A | Breast | 835 |
| AVYSEILSVV | HLA-A02:01 | ANKRD30A | Breast | 836 |
| ASLTPLLLSI | HLA-A02:01 | ANKRD30A | Breast | 837 |
| ILIDSGADINLV | HLA-A02:01 | ANKRD30A | Breast | 838 |
| VLIAENTML | HLA-A02:01 | ANKRD30A | Breast | 839 |
| ILIDSGADINL | HLA-A02:01 | ANKRD30A | Breast | 840 |
| SLFESSAKIQV | HLA-A02:01 | ANKRD30A | Breast | 841 |
| ILKEKNAEL | HLA-A02:01 | ANKRD30A | Breast | 842 |
| ILIDSGADI | HLA-A02:01 | ANKRD30A | Breast | 843 |
| ILNEKIREEL | HLA-A02:01 | ANKRD30A | Breast | 844 |
| IMEYIRKLSK | HLA-A03:01 | ANKRD30A | Breast | 845 |
| KMQHHLLKEK | HLA-A03:01 | ANKRD30A | Breast | 846 |
| RMKVSIPTK | HLA-A03:01 | ANKRD30A | Breast | 847 |
| LELMDMQTFK | HLA-A03:01 | ANKRD30A | Breast | 848 |
| LLHENCMLKK | HLA-A03:01 | ANKRD30A | Breast | 849 |
| KALELMDMQTFK | HLA-A03:01 | ANKRD30A | Breast | 850 |
| KVLEKGRSK | HLA-A03:01 | ANKRD30A | Breast | 851 |
| ELMDMQTFK | HLA-A03:01 | ANKRD30A | Breast | 852 |
| SLCETVSQK | HLA-A03:01 | ANKRD30A | Breast | 853 |
| RIYQYEKEK | HLA-A03:01 | ANKRD30A | Breast | 854 |
| KLEDSTSLSK | HLA-A03:01 | ANKRD30A | Breast | 855 |
| AVYSEILSVVAK | HLA-A03:01 | ANKRD30A | Breast | 856 |
| CVARVTSNK | HLA-A11:01 | ANKRD30A | Breast | 857 |
| RSLFESSAK | HLA-A11:01 | ANKRD30A | Breast | 858 |
| LELMDMQTFK | HLA-A11:01 | ANKRD30A | Breast | 859 |
| SVPNKAFELK | HLA-A11:01 | ANKRD30A | Breast | 860 |
| ATLKHQYQEK | HLA-A11:01 | ANKRD30A | Breast | 861 |
| ITIDIHFLERK | HLA-A11:01 | ANKRD30A | Breast | 862 |
| VCIPESIYQK | HLA-A11:01 | ANKRD30A | Breast | 863 |
| ITIDIHFLER | HLA-A11:01 | ANKRD30A | Breast | 864 |
| AVIEVHNK | HLA-A11:01 | ANKRD30A | Breast | 865 |
| QVCIPESIYQK | HLA-A11:01 | ANKRD30A | Breast | 866 |
| AVYSEILSVVAK | HLA-A11:01 | ANKRD30A | Breast | 867 |
| CIPESIYQK | HLA-A11:01 | ANKRD30A | Breast | 868 |
| KYKCTALML | HLA-A24:02 | ANKRD30A | Breast | 869 |
| VYSEILSVV | HLA-A24:02 | ANKRD30A | Breast | 870 |
| HYAVYSEIL | HLA-A24:02 | ANKRD30A | Breast | 871 |
| IYQKVMEI | HLA-A24:02 | ANKRD30A | Breast | 872 |
| QYSGQLKVLI | HLA-A24:02 | ANKRD30A | Breast | 873 |
| HYAVTCGFHHI | HLA-A24:02 | ANKRD30A | Breast | 874 |
| QYQEKENKYF | HLA-A24:02 | ANKRD30A | Breast | 875 |
| EYSCDSRSLF | HLA-A24:02 | ANKRD30A | Breast | 876 |
| QYSGQLKVL | HLA-A24:02 | ANKRD30A | Breast | 877 |
| RMKVSIPTK | HLA-A30:01 | ANKRD30A | Breast | 878 |
| RSKMIACPTK | HLA-A30:01 | ANKRD30A | Breast | 879 |
| GMKVSIPTK | HLA-A30:01 | ANKRD30A | Breast | 880 |
| RSKMIACPT | HLA-A30:01 | ANKRD30A | Breast | 881 |
| AQRKSKSLK | HLA-A30:01 | ANKRD30A | Breast | 882 |
| KSKSLKINL | HLA-A30:01 | ANKRD30A | Breast | 883 |
| KLKEESLTK | HLA-A30:01 | ANKRD30A | Breast | 884 |
| SQKDVCLPK | HLA-A30:01 | ANKRD30A | Breast | 885 |
| SQKDVCVPK | HLA-A30:01 | ANKRD30A | Breast | 886 |
| SLRETVSQK | HLA-A30:01 | ANKRD30A | Breast | 887 |
| KVLEKGRSK | HLA-A30:01 | ANKRD30A | Breast | 888 |
| ITIDIHFLER | HLA-A33:03 | ANKRD30A | Breast | 889 |
| FTWAAKGRPR | HLA-A33:03 | ANKRD30A | Breast | 890 |
| FTWPAKGRPR | HLA-A33:03 | ANKRD30A | Breast | 891 |
| NSWDSESLR | HLA-A33:03 | ANKRD30A | Breast | 892 |
| TVHSCERAR | HLA-A33:03 | ANKRD30A | Breast | 893 |
| NTLVSEHAQR | HLA-A33:03 | ANKRD30A | Breast | 894 |
| NYNNHLKNR | HLA-A33:03 | ANKRD30A | Breast | 895 |
| DEAAPLVER | HLA-A33:03 | ANKRD30A | Breast | 896 |
| EAAPLVER | HLA-A33:03 | ANKRD30A | Breast | 897 |
| IFNYNNHLKNR | HLA-A33:03 | ANKRD30A | Breast | 898 |
| FNYNNHLKNR | HLA-A33:03 | ANKRD30A | Breast | 899 |
| TPREITSPA | HLA-B07:02 | ANKRD30A | Breast | 900 |
| KPSAFKPAI | HLA-B07:02 | ANKRD30A | Breast | 901 |
| HPRLASAV | HLA-B07:02 | ANKRD30A | Breast | 902 |
| TPREIMSPA | HLA-B07:02 | ANKRD30A | Breast | 903 |
| WPAKGRPRKI | HLA-B07:02 | ANKRD30A | Breast | 904 |
| VPKATHQKEM | HLA-B07:02 | ANKRD30A | Breast | 905 |
| KPSAFEPAI | HLA-B07:02 | ANKRD30A | Breast | 906 |
| TPDEAASL | HLA-B07:02 | ANKRD30A | Breast | 907 |
| VPNKALEL | HLA-B07:02 | ANKRD30A | Breast | 908 |
| EPPGKPSAP | HLA-B07:02 | ANKRD30A | Breast | 909 |
| QMKKKFCVL | HLA-B08:01 | ANKRD30A | Breast | 910 |
| MEQMKKKFCVL | HLA-B08:01 | ANKRD30A | Breast | 911 |
| KMEQMKKKPCVL | HLA-B08:01 | ANKRD30A | Breast | 912 |
| MKKKFCVL | HLA-B08:01 | ANKRD30A | Breast | 913 |
| EQMKKKFCVL | HLA-B08:01 | ANKRD30A | Breast | 914 |
| MLKLEIATL | HLA-B08:01 | ANKRD30A | Breast | 915 |
| MEQMKKKFCVLK | HLA-B08:01 | ANKRD30A | Breast | 916 |
| TLKLKEESL | HLA-B08:01 | ANKRD30A | Breast | 917 |
| ILKEKNAEL | HLA-B08:01 | ANKRD30A | Breast | 918 |
| VNKYKCTAL | HLA-B08:01 | ANKRD30A | Breast | 919 |
| EVHNKASL | HLA-B08:01 | ANKRD30A | Breast | 920 |
| EAQRKSKSL | HLA-B08:01 | ANKRD30A | Breast | 921 |
| SEQIVEFLLI | HLA-B13:02 | ANKRD30A | Breast | 922 |
| KEILAMLKLEI | HLA-B13:02 | ANKRD30A | Breast | 923 |
| QEACANILI | HLA-B13:02 | ANKRD30A | Breast | 924 |
| HEEVVTFLV | HLA-B13:02 | ANKRD30A | Breast | 925 |
| HQEACANILI | HLA-B13:02 | ANKRD30A | Breast | 926 |
| SQYSGQLKV | HLA-B13:02 | ANKRD30A | Breast | 927 |
| EQIVEFLLI | HLA-B13:02 | ANKRD30A | Breast | 928 |
| AVYSEILSV | HLA-B13:02 | ANKRD30A | Breast | 929 |
| EQHRKELEV | HLA-B13:02 | ANKRD30A | Breast | 930 |
| KQDKEILEA | HLA-B13:02 | ANKRD30A | Breast | 931 |
| SQLENQKV | HLA-B13:02 | ANKRD30A | Breast | 932 |
| SAFEPATEM | HLA-B46:01 | ANKRD30A | Breast | 933 |
| SAFEPAIEM | HLA-B46:01 | ANKRD30A | Breast | 934 |
| YSCDSRSLF | HLA-B46:01 | ANKRD30A | Breast | 935 |
| HIHEQIMEY | HLA-B46:01 | ANKRD30A | Breast | 936 |
| SAFKPAIEM | HLA-B46:01 | ANKRD30A | Breast | 937 |
| YAVYSEILSV | HLA-B46:01 | ANKRD30A | Breast | 938 |
| ILKEKNAEL | HLA-B46:01 | ANKRD30A | Breast | 939 |
| HLKKRIYQY | HLA-B46:01 | ANKRD30A | Breast | 940 |
| SVPNKALEL | HLA-C01:02 | ANKRD30A | Breast | 941 |
| SIPTKALEL | HLA-C01:02 | ANKRD30A | Breast | 942 |
| SVPNKAFEL | HLA-C01:02 | ANKRD30A | Breast | 943 |
| KTPDEAASL | HLA-C01:02 | ANKRD30A | Breast | 944 |
| KTPDEAAPL | HLA-C01:02 | ANKRD30A | Breast | 945 |
| SAFEPAIEM | HLA-C01:02 | ANKRD30A | Breast | 946 |
| HSCERAREL | HLA-C01:02 | ANKRD30A | Breast | 947 |
| SAFEPATEM | HLA-C03:04 | ANKRD30A | Breast | 948 |
| SAFEPAIEM | HLA-C03:04 | ANKRD30A | Breast | 949 |
| SAFKPAIEM | HLA-C03:04 | ANKRD30A | Breast | 950 |
| RASQYSGQL | HLA-C03:04 | ANKRD30A | Breast | 951 |
| STIYNNEVL | HLA-C03:04 | ANKRD30A | Breast | 952 |
| YAVYSEILSV | HLA-C03:04 | ANKRD30A | Breast | 953 |
| VSIPTKALEL | HLA-C03:04 | ANKRD30A | Breast | 954 |
| VSIPTKAL | HLA-C03:04 | ANKRD30A | Breast | 955 |
| YSCDSRSI | HLA-C03:04 | ANKRD30A | Breast | 956 |
| HQEACANIL | HLA-C04:01 | ANKRD30A | Breast | 957 |
| GHEEVVTFL | HLA-C04:01 | ANKRD30A | Breast | 958 |
| YFEDIKILK | HLA-C04:01 | ANKRD30A | Breast | 959 |
| FHIAGDACL | HLA-C04:01 | ANKRD30A | Breast | 960 |
| SVPNKAFEL | HLA-C04:01 | ANKRD30A | Breast | 961 |
| HYAVYSEIL | HLA-C04:01 | ANKRD30A | Breast | 962 |
| AFEPAIEM | HLA-C04:01 | ANKRD30A | Breast | 963 |
| AFEPATEM | HLA-C04:01 | ANKRD30A | Breast | 964 |
| IFNYNNHL | HLA-C04:01 | ANKRD30A | Breast | 965 |
| TPDEAASL | HLA-C04:01 | ANKRD30A | Breast | 966 |
| SWDTESLC | HLA-C04:01 | ANKRD30A | Breast | 967 |
| SWDSESLC | HLA-C04:01 | ANKRD30A | Breast | 968 |
| HRTPLMKAL | HLA-C07:01 | ANKRD30A | Breast | 969 |
| SIYQKVMEI | HLA-C07:01 | ANKRD30A | Breast | 970 |
| KRSEQIVEF | HLA-C07:01 | ANKRD30A | Breast | 971 |
| FHHIHEQIM | HLA-C07:01 | ANKRD30A | Breast | 972 |
| ERKMQHHLL | HLA-C07:01 | ANKRD30A | Breast | 973 |
| NKYKCTALM | HLA-C07:01 | ANKRD30A | Breast | 974 |
| RRNADILNE | HLA-C07:01 | ANKRD30A | Breast | 975 |
| KRSEQIVE | HLA-C07:01 | ANKRD30A | Breast | 976 |
| CGFHHIHEQ | HLA-C07:01 | ANKRD30A | Breast | 977 |
| RSEQIVEF | HLA-C07:01 | ANKRD30A | Breast | 978 |
| HIHEQIMEY | HLA-C07:01 | ANKRD30A | Breast | 979 |
| HRTPLMKAL | HLA-C07:02 | ANKRD30A | Breast | 980 |
| KRSEQIVEF | HLA-C07:02 | ANKRD30A | Breast | 981 |
| HYAVYSEIL | HLA-C07:02 | ANKRD30A | Breast | 982 |
| FHHIHEQIM | HLA-C07:02 | ANKRD30A | Breast | 983 |
| KYKCTALML | HLA-C07:02 | ANKRD30A | Breast | 984 |
| SIYQKVMEI | HLA-C07:02 | ANKRD30A | Breast | 985 |
| FHIAGDACL | HLA-C07:02 | ANKRD30A | Breast | 986 |
| HIHEQIMEY | HLA-C07:02 | ANKRD30A | Breast | 987 |
| KTPDEAASL | HLA-C07:02 | ANKRD30A | Breast | 988 |
| CSGHTLLEY | HLA-A01:01 | AQP12B; | Pancreas | 989 |
| | | AQP12A | | |
| FACSGHTLLEY | HLA-A01:01 | AQP12B; | Pancreas | 990 |
| | | AQP12A | | |
| HLFQRNLFY | HLA-A01:01 | AQP12B; | Pancreas | 991 |
| | | AQP12A | | |
| LSDLHLLQS | HLA-A01:01 | AQP12B; | Pancreas | 992 |
| | | AQP12A | | |
| LSDLHLLQ | HLA-A01:01 | AQP12B; | Pancreas | 993 |
| | | AQP12A | | |
| LLEYVQVY | HLA-A01:01 | AQP12B; | Pancreas | 994 |
| | | AQP12A | | |
| FLLFLAHGV | HLA-A02:01 | AQP12B; | Pancreas | 995 |
| | | AQP12A | | |
| LMRLCWAWEL | HLA-A02:01 | AQP12A | Pancreas | 996 |
| LLLTLLFLL | HLA-A02:01 | AQP12B; | Pancreas | 997 |
| | | AQP12A | | |
| ALLPVGAYEV | HLA-A02:01 | AQP12B; | Pancreas | 998 |
| | | AQP12A | | |
| LLPVGAYEV | HLA-A02:01 | AQP12B; | Pancreas | 999 |
| | | AQP12A | | |
| LFLLFLAHGV | HLA-A02:01 | AQP12B; | Pancreas | 1000 |
| | | AQP12A | | |
| FLLFLAHGVT | HLA-A02:01 | AQP12B; | Pancreas | 1001 |
| | | AQP12A | | |
| TLMRLCWAWEL | HLA-A02:01 | AQP12A | Pancreas | 1002 |
| SLSFFFATFA | HLA-A02:01 | AQP12A | Pancreas | 1003 |
| FTSAFFNPA | HLA-A02:01 | AQP12B; | Pancreas | 1004 |
| | | AQP12A | | |
| TLLEYVQVYWL | HLA-A02:01 | AQP12B; | Pancreas | 1005 |
| | | AQP12A | | |
| SLPGTLLKL | HLA-A02:01 | AQP12B; | Pancreas | 1006 |
| | | AQP12A | | |
| TLLEYVQV | HLA-A02:01 | AQP12B; | Pancreas | 1007 |
| | | AQP12A | | |
| ALAASVTFA | HLA-A02:01 | AQP12B; | Pancreas | 1008 |
| | | AQP12A | | |
| TLVELGPWA | HLA-A02:01 | AQP12B; | Pancreas | 1009 |
| | | AQP12A | | |
| FLAHGVTL | HLA-A02:01 | AQP12B; | Pancreas | 1010 |
| | | AQP12A | | |
| HLFQRNLFY | HLA-A03:01 | AQP12B; | Pancreas | 1011 |
| | | AQP12A | | |
| RNLFYGQKNK | HLA-A03:01 | AQP12B; | Pancreas | 1012 |
| | | AQP12A | | |
| HLFQRNLFYGQK | HLA-A03:01 | AQP12B | Pancreas | 1013 |
| | | AQP12A | | |
| ALLVTVTAY | HLA-A03:01 | AQP12B; | Pancreas | 1014 |
| | | AQP12A | | |
| QSLPGTLLK | HLA-A03:01 | AQP12A | Pancreas | 1015 |
| QSLPGTLLK | HLA-A11:01 | AQP12A | Pancreas | 1016 |
| MAEQSLPGTLLK | HLA-A11:01 | AQP12A | Pancreas | 1017 |
| HLFQRNLFY | HLA-A11:01 | AQP12B; | Pancreas | 1018 |
| | | AQP12A | | |
| ATFALCEAAR | HLA-A11:01 | AQP12A | Pancreas | 1019 |
| GRLPHLFQR | HLA-A11:01 | AQP12B; | Pancreas | 1020 |
| | | AQP12A | | |
| AYTAGPFTSAFF | HLA-A24:02 | AQP12B; | Pancreas | 1021 |
| | | AQP12A | | |
| SLSFFFATF | HLA-A24:02 | AQP12B; | Pancreas | 1022 |
| | | AQP12A | | |
| SFFFATFAL | HLA-A24:02 | AQP12A | Pancreas | 1023 |
| AYSGPAVALL | HLA-A24:02 | AQP12B; | Pancreas | 1024 |
| | | AQP12A | | |
| AYSGPAVAL | HLA-A24:02 | AQP12B; | Pancreas | 1025 |
| | | AQP12A | | |
| LLTLLFLLF | HLA-A24:02 | AQP12B; | Pancreas | 1026 |
| | | AQP12A | | |
| KYRAPRGKPA | HLA-A30:01 | AQP12B; | Pancreas | 1027 |
| | | AQP12A | | |
| ASKALLPVGA | HLA-A30:01 | AQP12B; | Pancreas | 1028 |
| | | AQP12A | | |
| RAPRQKPAPA | HLA-A30:01 | AQP12B; | Pancreas | 1029 |
| | | AQP12A | | |
| KNKYRAPRQK | HLA-A30:01 | AQP12B: | Pancreas | 1030 |
| | | AQP12A | | |
| HTLLEYVQV | HLA-A30:01 | AQP12B; | Pancreas | 1031 |
| | | AQP12A | | |
| SVREPGRSGV | HLA-A30:01 | AQP12B; | Pancreas | 1032 |
| | | AQP12A | | |
| EVFAREAMR | HLA-A33:03 | AQP12A | Pancreas | 1033 |
| YEVFAREAMR | HLA-A33:03 | AQP12A | Pancreas | 1034 |
| TFALCEAAR | HLA-A33:03 | AQP12A | Pancreas | 1035 |
| LFYGQKNKYR | HLA-A33:03 | AQP12B; | Pancreas | 1036 |
| | | AQP12A | | |
| MAQSCSSALR | HLA-A33:03 | AQP12B; | Pancreas | 1037 |
| | | AQP12A | | |
| FYGQKNKYR | HLA-A33:03 | AQP12B; | Pancreas | 1038 |
| | | AQP12A | | |
| AARRASKAL | HLA-B07:02 | AQP12B; | Pancreas | 1039 |
| | | AQP12A | | |
| APRGKPAPA | HLA-B07:02 | AQP12B; | Pancreas | 1040 |
| | | AQP12A | | |
| RAPRGKPAPA | HLA-B07:02 | AQP12B; | Pancreas | 1041 |
| | | AQP12A | | |
| GPDLLLTLL | HLA-B07:02 | AQP12B; | Pancreas | 1042 |
| | | AQP12A | | |
| AYSGPAVAL | HLA-B07:02 | AQP12B; | Pancreas | 1043 |
| | | AQP12A | | |
| LLHLRHSPPA | HLA-B08:01 | AQP12B; | Pancreas | 1044 |
| | | AQP12A | | |
| LLHLRHSPP | HLA-B08:01 | AQP12B; | Pancreas | 1045 |
| | | AQP12A | | |
| LMRLCWAWEL | HLA-B08:01 | AQP12A | Pancreas | 1046 |
| LLHQGRLPHL | HLA-B08:01 | AQP12B; | Pancreas | 1047 |
| | | AQP12A | | |
| DLHLLQSL | HLA-B08:01 | AQP12B; | Pancreas | 1048 |
| | | AQP12A | | |
| SANPTVSL | HLA-B08:01 | AQP12B; | Pancreas | 1049 |
| | | AQP12A | | |
| EMRTLVEL | HLA-B08:01 | AQP12B; | Pancreas | 1050 |
| | | AQP12A | | |
| LEMRTLVEL | HLA-B13:02 | AQP12B | Pancreas | 1051 |
| | | AQP12A | | |
| WELSDLHLL | HLA-B13:02 | AQP12B; | Pancreas | 1052 |
| | | AQP12A | | |
| LEYVQVYWL | HLA-B13:02 | AQP12B; | Pancreas | 1053 |
| | | AQP12A | | |
| SLPGTLLKL | HLA-B13:02 | AQP12B: | Pancreas | 1054 |
| | | AQP12A | | |
| RLPHLFQRN | HLA-B13:02 | AQP12B; | Pancreas | 1055 |
| | | AQP12A | | |
| ALLPVGAYEV | HLA-B13:02 | AQP12B; | Pancreas | 1056 |
| | | AQP12A | | |
| YTAGPFTSAF | HLA-B46:01 | AQP12B; | Pancreas | 1057 |
| | | AQP12A | | |
| FAREAMRTL | HLA-B46:01 | AQP12A | Pancreas | 1058 |
| FAREAVGAV | HLA-B46:01 | AQP12B; | Pancreas | 1059 |
| | | AQP12A | | |
| TAGPFTSAF | HLA-B46:01 | AQP12B; | Pancreas | 1060 |
| | | AQP12A | | |
| ASANPTVSL | HLA-B46:01 | AQP12B; | Pancreas | 1061 |
| | | AQP12A | | |
| SANPTVSL | HLA-B46:01 | AQP12B; | Pancreas | 1062 |
| | | AQP12A | | |
| YSGPAVALL | HLA-C01:02 | AQP12B; | Pancreas | 1063 |
| | | AQP12A | | |
| MAQSCSSAL | HLA-C01:02 | AQP12B; | Pancreas | 1064 |
| | | AQP12A | | |
| FGPDLLLTL | HLA-C01:02 | AQP12B; | Pancreas | 1065 |
| | | AQP12A | | |
| LGPLTGMVL | HLA-C01:02 | AQP12B; | Pancreas | 1066 |
| | | AQP12A | | |
| SLPGTLLKL | HLA-C01:02 | AQP12B; | Pancreas | 1067 |
| | | AQP12A | | |
| MAQSCSSAL | HLA-C03:04 | AQP12B; | Pancreas | 1068 |
| | | AQP12A | | |
| FAREAMRTL | HLA-C03:04 | AQP12A | Pancreas | 1069 |
| FACSGHTLL | HLA-C03:04 | AQP12B; | Pancreas | 1070 |
| | | AQP12A | | |
| FACSGHTL | HLA-C03:04 | AQP12B; | Pancreas | 1071 |
| | | AQP12A | | |
| MAQSCSSAL | HLA-C04:01 | AQP12B; | Pancreas | 1072 |
| | | AQP12A | | |
| AYSGPAVAL | HLA-C04:01 | AQP12B: | Pancreas | 1073 |
| | | AQP12A | | |
| MRLCWAWEL | HLA-C04:01 | AQP12A | Pancreas | 1074 |
| FFNPALAASV | HLA-C04:01 | AQP12B; | Pancreas | 1075 |
| | | AQP12A | | |
| AFCFHLTLL | HLA-C04:01 | AQP12B; | Pancreas | 1076 |
| | | AQP12A | | |
| CFHLTLLHL | HLA-C04:01 | AQP12B | Pancreas | 1077 |
| | | AQP12A | | |
| MRLCWAWEL | HLA-C07:01 | AQP12A | Pancreas | 1078 |
| FAREAMRTL | HLA-C07:01 | AQP12A | Pancreas | 1079 |
| YRAPRGKPA | HLA-C07:01 | AQP12B: | Pancreas | 1080 |
| | | AQP12A | | |
| TLLEYVQVY | HLA-C07:01 | AQP12B; | Pancreas | 1081 |
| | | AQP12A | | |
| CSGHTLLEY | HLA-C07:01 | AQP12B; | Pancreas | 1082 |
| | | AQP12A | | |
| MRLCWAWEL | HLA-C07:02 | AQP12A | Pancreas | 1083 |
| FAREAMRTL | HLA-C07:02 | AQP12A | Pancreas | 1084 |
| SFFFATFAL | HLA-C07:02 | AQP12A | Pancreas | 1085 |
| AYSGPAVAL | HLA-C07:02 | AQP12B; | Pancreas | 1086 |
| | | AQP12A | | |
| FGPDLLLTL | HLA-C07:02 | AQP12B; | Pancreas | 1087 |
| | | AQP12A | | |
| FLEMRTLVEL | HLA-A01:01 | AQP12B | Pancreas | 1088 |
| LTRLCWAWEL | HLA-A01:01 | AQP12B | Pancreas | 1089 |
| FATFTLCEA | HLA-A01:01 | AQP12B | Pancreas | 1090 |
| CTLTRLCWA | HLA-A01:01 | AQP12B | Pancreas | 1091 |
| FLEMRTLV | HLA-A01:01 | AQP12B | Pancreas | 1092 |
| ESLPGTLLK | HLA-A01:01 | AQP12B | Pancreas | 1093 |
| FLEMRTLVE | HLA-A01:01 | AQP12B | Pancreas | 1094 |
| FLEMRTLVEL | HLA-A02:01 | AQP12B | Pancreas | 1095 |
| FLMAEESLPGT | HLA-A02:01 | AQP12B | Pancreas | 1096 |
| CFLEMRTLVEL | HLA-A02:01 | AQP12B | Pancreas | 1097 |
| RLHPDAPLL | HLA-A02:01 | AQP12B | Pancreas | 1098 |
| ACFLEMRTLVEL | HLA-A02:01 | AQP12B | Pancreas | 1099 |
| FLEMRTLVELG | HLA-A02:01 | AQP12B | Pancreas | 1100 |
| TLTRICWAWEL | HLA-A02:01 | AQP12B | Pancreas | 1101 |
| FLMAEESL | HLA-A02:01 | AQP12B | Pancreas | 1102 |
| EFLMAEESLPGT | HLA-A02:01 | AQP12B | Pancreas | 1103 |
| RLHPDAPLLGL | HLA-A02:01 | AQP12B | Pancreas | 1104 |
| TLCEAARRA | HLA-A02:01 | AQP12B | Pancreas | 1105 |
| FLMAEESLP | HLA-A02:01 | AQP12B | Pancreas | 1106 |
| FLEMRTLV | HLA-A02:01 | AQP12B | Pancreas | 1107 |
| SLSFFFATFTL | HLA-A02:01 | AQP12B | Pancreas | 1108 |
| GMQAACTLTR | HLA-A03:01 | AQP12B | Pancreas | 1109 |
| MAEESLPGTLLK | HLA-A03:01 | AQP12B | Pancreas | 1110 |
| TLCEAARRASK | HLA-A03:01 | AQP12B | Pancreas | 1111 |
| AEESLPGTLLK | HLA-A03:01 | AQP12B | Pancreas | 1112 |
| ESLPGTLLK | HLA-A03:01 | AQP12B | Pancreas | 1113 |
| RLHPDAPLLGL | HLA-A03:01 | AQP12B | Pancreas | 1114 |
| RLHPDAPLLG | HLA-A03:01 | AQP12B | Pancreas | 1115 |
| ESLPGTLLK | HLA-A11:01 | AQP12B | Pancreas | 1116 |
| MAEESLPGTLLK | HLA-A11:01 | AQP12B | Pancreas | 1117 |
| AEESLPGTLLK | HLA-A11:01 | AQP12B | Pancreas | 1118 |
| ATFTLCEAAR | HLA-A11:01 | AQP12B | Pancreas | 1119 |
| GTGAGHAGR | HLA-A11:01 | AQP12B | Pancreas | 1120 |
| SFFFATFTL | HLA-A24:02 | AQP12B | Pancreas | 1121 |
| LSFFFATFTL | HLA-A24:02 | AQP12B | Pancreas | 1122 |
| SLSFFFATFTL | HLA-A24:02 | AQP12B | Pancreas | 1123 |
| RLHPDAPLL | HLA-A24:02 | AQP12B | Pancreas | 1124 |
| FFFATTL | HLA-A24:02 | AQP12B | Pancreas | 1125 |
| RGVSAWHAA | HLA-A30:01 | AQP12B | Pancreas | 1126 |
| HGRGVSAWHA | HLA-A30:01 | AQP12B | Pancreas | 1127 |
| CTLTRLCWA | HLA-A30:01 | AQP12B | Pancreas | 1128 |
| RLHPDAPLL | HLA-A30:01 | AQP12B | Pancreas | 1129 |
| ESLPGTLLK | HLA-A30:01 | AQP12B | Pancreas | 1130 |
| ACFLEMRTL | HLA-A30:01 | AQP12B | Pancreas | 1131 |
| TFTLCEAAR | HLA-A33:03 | AQP12B | Pancreas | 1132 |
| ATFTLCEAAR | HLA-A33:03 | AQP12B | Pancreas | 1133 |
| FTLCEAARR | HLA-A33:03 | AQP12B | Pancreas | 1134 |
| ESLPGTLLK | HLA-A33:03 | AQP12B | Pancreas | 1135 |
| VPHGRGVSA | HLA-B07:02 | AQP12B | Pancreas | 1136 |
| HPDAPLLGL | HLA-B07:02 | AQP12B | Pancreas | 1137 |
| GVPHGRGVSA | HLA-B07:02 | AQP12B | Pancreas | 1138 |
| VPHGRGVSAW | HLA-B07:02 | AQP12B | Pancreas | 1139 |
| FLEMRTLVEL | HLA-B08:01 | AQP12B | Pancreas | 1140 |
| VPHGRGVSA | HLA-B08:01 | AQP12B | Pancreas | 1141 |
| FLEMRTLV | HLA-B08:01 | AQP12B | Pancreas | 1142 |
| ESLPGTLL | HLA-B08:01 | AQP12B | Pancreas | 1143 |
| LSFFFATFTL | HLA-B13:02 | AQP12B | Pancreas | 1144 |
| FLEMRTLVEL | HLA-B13:02 | AQP12B | Pancreas | 1145 |
| MQAACTLTRL | HLA-B13:02 | AQP12B | Pancreas | 1146 |
| RLHPDAPLL | HLA-B13:02 | AQP12B | Pancreas | 1147 |
| AVGAVQLGA | HLA-B13:02 | AQP12B | Pancreas | 1148 |
| HPDAPLLGL | HLA-B13:02 | AQP12B | Pancreas | 1149 |
| GAVQLGACF | HLA-B46:01 | AQP12B | Pancreas | 1150 |
| FATFTLCEA | HLA-B46:01 | AQP12B | Pancreas | 1151 |
| MQAACTLTRL | HLA-B46:01 | AQP12B | Pancreas | 1152 |
| VSAWHAAEA | HLA-B46:01 | AQP12B | Pancreas | 1153 |
| VPHGRGVSA | HLA-B46:01 | AQP12B | Pancreas | 1154 |
| HAAEAGGTG | HLA-B46:01 | AQP12B | Pancreas | 1155 |
| RLHPDAPLL | HLA-C01:02 | AQP12B | Pancreas | 1156 |
| SFFFATFTL | HLA-C01:02 | AQP12B | Pancreas | 1157 |
| FLEMRTLVEL | HLA-C01:02 | AQP12B | Pancreas | 1158 |
| LHPDAPLLGL | HLA-C01:02 | AQP12B | Pancreas | 1159 |
| RLHPDAPL | HLA-C01:02 | AQP12B | Pancreas | 1160 |
| FATFTLCEA | HLA-C03:04 | AQP12B | Pancreas | 1161 |
| QAACTLTRL | HLA-C03:04 | AQP12B | Pancreas | 1162 |
| MQAACTLTRL | HLA-C03:04 | AQP12B | Pancreas | 1163 |
| FFFATFTL | HLA-C03:04 | AQP12B | Pancreas | 1164 |
| ESLPGTLL | HLA-C03:04 | AQP12B | Pancreas | 1165 |
| FLMAEESL | HLA-C03:04 | AQP12B | Pancreas | 1166 |
| RLHPDAPLL | HLA-C04:01 | AQP12B | Pancreas | 1167 |
| TRLCWAWEL | HLA-C04:01 | AQP12B | Pancreas | 1168 |
| LHPDAPLLGL | HLA-C04:01 | AQP12B | Pancreas | 1169 |
| FFFATFTL | HLA-C04:01 | AQP12B | Pancreas | 1170 |
| SFFFATFTL | HLA-C04:01 | AQP12B | Pancreas | 1171 |
| FFFATFTLC | HLA-C04:01 | AQP12B | Pancreas | 1172 |
| TRLCWAWEL | HLA-C07:01 | AQP12B | Pancreas | 1173 |
| SFFFATFTL | HLA-C07:01 | AQP12B | Pancreas | 1174 |
| LTRLCWAWEL | HLA-C07:01 | AQP12B | Pancreas | 1175 |
| ACFLEMRTL | HLA-C07:01 | AQP12B | Pancreas | 1176 |
| GRLHPDAPLL | HLA-C07:01 | AQP12B | Pancreas | 1177 |
| TRICWAWEL | HLA-C07:02 | AQP12B | Pancreas | 1178 |
| SFFFATFTL | HLA-C07:02 | AQP12B | Pancreas | 1179 |
| RLHPDAPLL | HLA-C07:02 | AQP12B | Pancreas | 1180 |
| LHPDAPLL | HLA-C07:02 | AQP12B | Pancreas | 1181 |
| FFFATFTL | HLA-C07:02 | AQP12B | Pancreas | 1182 |
| NSDFAPHPY | HLA-A01:01 | C2orf53 | Testis | 1183 |
| SNSDFAPHPY | HLA-A01:01 | C2orf53 | Testis | 1184 |
| CDSNSDFAPHPY | HLA-A01:01 | C2orf53 | Testis | 1185 |
| ASSPSNHWLY | HLA-A01:01 | C2orf53 | Testis | 1186 |
| SSPSNHWLY | HLA-A01:01 | C2orf53 | Testis | 1187 |
| RLLAFPQLL | HLA-A02:01 | C2orf53 | Testis | 1188 |
| RLLAFPQLLPCV | HLA-A02:01 | C2orf53 | Testis | 1189 |
| YMPGVPPA | HLA-A02:01 | C2orf53 | Testis | 1190 |
| ALASVQGHWV | HLA-A02:01 | C2orf53 | Testis | 1191 |
| ALAQALVVQL | HLA-A02:01 | C2orf53 | Testis | 1192 |
| WLYPSPPLT | HLA-A02:01 | C2orf53 | Testis | 1193 |
| LLAFPQLLPCV | HLA-A02:01 | C2orf53 | Testis | 1194 |
| WLYPSPPL | HLA-A02:01 | C2orf53 | Testis | 1195 |
| PRLLAFPQLL | HLA-A02:01 | C2orf53 | Testis | 1196 |
| PLLPPPQV | HLA-A02:01 | C2orf53 | Testis | 1197 |
| SVQGHWVRV | HLA-A02:01 | C2orf53 | Testis | 1198 |
| QLVDSSPHNL | HLA-A02:01 | C2orf53 | Testis | 1199 |
| RLLAFPQL | HLA-A02:01 | C2orf53 | Testis | 1200 |
| YLSLPRPRA | HLA-A02:01 | C2orf53 | Testis | 1201 |
| RQTWRWHQYR | HLA-A03:01 | C2orf53 | Testis | 1202 |
| RALHLLPEK | HLA-A03:01 | C2orf53 | Testis | 1203 |
| RLHSNRQTWR | HLA-A03:01 | C2orf53 | Testis | 1204 |
| RLLAFPQLLPC | HLA-A03:01 | C2orf53 | Testis | 1205 |
| VSLELILQK | HLA-A03:01 | C2orf53 | Testis | 1206 |
| WLYPSPPLTP | HLA-A03:01 | C2orf53 | Testis | 1207 |
| VSLELILQK | HLA-A11:01 | C2orf53 | Testis | 1208 |
| ATAFAAPVAR | HLA-A11:01 | C2orf53 | Testis | 1209 |
| RALHLLPEK | HLA-A11:01 | C2orf53 | Testis | 1210 |
| QTWRWHQYR | HLA-A11:01 | C2orf53 | Testis | 1211 |
| ASVQGHWVR | HLA-A11:01 | C2orf53 | Testis | 1212 |
| LYPSPPLTPSF | HLA-A24:02 | C2orf53 | Testis | 1213 |
| FFHQNYLSL | HLA-A24:02 | C2orf53 | Testis | 1214 |
| RYRTGPRLLAF | HLA-A24:02 | C2orf53 | Testis | 1215 |
| RLLLLQHLW | HLA-A24:02 | C2orf53 | Testis | 1216 |
| SLPSSPTFF | HLA-A24:02 | C2orf53 | Testis | 1217 |
| RYRTGPRLL | HLA-A24:02 | C2orf53 | Testis | 1218 |
| RTRPAATAFA | HLA-A30:01 | C2orf53 | Testis | 1219 |
| RTRPAATAFAA | HLA-A30:01 | C2orf53 | Testis | 1220 |
| HRTRPAATAFA | HLA-A30:01 | C2orf53 | Testis | 1221 |
| VSLELILQK | HLA-A30:01 | C2orf53 | Testis | 1222 |
| RYRTGPRLL | HLA-A30:01 | C2orf53 | Testis | 1223 |
| SVLPGRPTW | HLA-A30:01 | C2orf53 | Testis | 1224 |
| QTWRWHQYR | HLA-A33:03 | C2orf53 | Testis | 1225 |
| NRQTWRWHQYR | HLA-A33:03 | C2orf53 | Testis | 1226 |
| RQTWRWHQYR | HLA-A33:03 | C2orf53 | Testis | 1227 |
| TAFAAPVAR | HLA-A33:03 | C2orf53 | Testis | 1228 |
| NYLSLPRPR | HLA-A33:03 | C2orf53 | Testis | 1229 |
| RPRSPSCPL | HLA-B07:02 | C2orf53 | Testis | 1230 |
| APKQVTTSL | HLA-B07:02 | C2orf53 | Testis | 1231 |
| RPTWGFSQL | HLA-B07:02 | C2orf53 | Testis | 1232 |
| LPRYRTGPRL | HLA-B07:02 | C2orf53 | Testis | 1233 |
| LRPRSPSCPL | HLA-B07:02 | C2orf53 | Testis | 1234 |
| SPSLPSSPTE | HLA-B07:02 | C2orf53 | Testis | 1235 |
| SPSQPQNSSL | HLA-B07:02 | C2orf53 | Testis | 1236 |
| LPRYRTGPRL | HLA-B08:01 | C2orf53 | Testis | 1237 |
| CLRPRSPSCPL | HLA-B08:01 | C2orf53 | Testis | 1238 |
| LPRYRTGPRLL | HLA-B08:01 | C2orf53 | Testis | 1239 |
| PGPKRPVSL | HLA-B08:01 | C2orf53 | Testis | 1240 |
| APKQVTTSL | HLA-B08:01 | C2orf53 | Testis | 1241 |
| GPKRPVSL | HLA-B08:01 | C2orf53 | Testis | 1242 |
| VEYPICLVCL | HLA-B13:02 | C2orf53 | Testis | 1243 |
| RPTWGFSQLV | HLA-B13:02 | C2orf53 | Testis | 1244 |
| GQAPVVEYPI | HLA-B13:02 | C2orf53 | Testis | 1245 |
| GQESGPLRI | HLA-B13:02 | C2orf53 | Testis | 1246 |
| GQARALALL | HLA-B13:02 | C2orf53 | Testis | 1247 |
| RLLAFPQLL | HLA-B13:02 | C2orf53 | Testis | 1248 |
| RTRPAATAF | HLA-B46:01 | C2orf53 | Testis | 1249 |
| HRTRPAATAP | HLA-B46:01 | C2orf53 | Testis | 1250 |
| RTGPRLLAF | HLA-B46:01 | C2orf53 | Testis | 1251 |
| FFHQNYLSL | HLA-B46:01 | C2orf53 | Testis | 1252 |
| FSGPPPRAP | HLA-B46:01 | C2orf53 | Testis | 1253 |
| PSPPLTPSF | HLA-B46:01 | C2orf53 | Testis | 1254 |
| FAPHPYSPSL | HLA-C01:02 | C2orf53 | Testis | 1255 |
| SSPHNLQPL | HLA-C01:02 | C2orf53 | Testis | 1256 |
| SLPSSPTFF | HLA-C01:02 | C2orf53 | Testis | 1257 |
| FFHQNYLSL | HLA-C01:02 | C2orf53 | Testis | 1258 |
| RLPQGQARAL | HLA-C01:02 | C2orf53 | Testis | 1259 |
| AATAFAAPV | HLA-C03:04 | C2orf53 | Testis | 1260 |
| FAPHPYSPSL | HLA-C03:04 | C2orf53 | Testis | 1261 |
| IAHDLRLLL | HLA-C03:04 | C2orf53 | Testis | 1262 |
| FAAPVARQN | HLA-C03:04 | C2orf53 | Testis | 1263 |
| FFHQNYLSL | HLA-C04:01 | C2orf53 | Testis | 1264 |
| SLPSSPTFF | HLA-C04:01 | C2orf53 | Testis | 1265 |
| AHDLRLLLL | HLA-C04:01 | C2orf53 | Testis | 1266 |
| LVDSSPHNL | HLA-C04:01 | C2orf53 | Testis | 1267 |
| YRTGPRLLAF | HLA-C07:01 | C2orf53 | Testis | 1268 |
| RRIAHDLRL | HLA-C07:01 | C2orf53 | Testis | 1269 |
| YRTGPRLLA | HLA-C07:01 | C2orf53 | Testis | 1270 |
| RRIAHDLRLL | HLA-C07:01 | C2orf3 | Testis | 1271 |
| KRPVSLEL | HLA-C07:01 | C2orf53 | Testis | 1272 |
| TGQAPVVEY | HLA-C07:01 | C2orf53 | Testis | 1273 |
| FFHQNYLSL | HLA-C07:02 | C2orf53 | Testis | 1274 |
| YRTGPRLLAF | HLA-C07:02 | C2orf53 | Testis | 1275 |
| RRIAHDLRL | HLA-C07:02 | C2orf53 | Testis | 1276 |
| KRPVSLEL | HLA-C07:02 | C2orf53 | Testis | 1277 |
| YRTGPRLL | HLA-C07:02 | C2orf53 | Testis | 1278 |
| NRPGPSRGVSY | HLA-C07:02 | C2orf53 | Testis | 1279 |
| WTFRGKIHAR | HLA-A01:01 | CCDC70 | Testis | 1280 |
| WMENNGHIA | HLA-A01:01 | CCDC70 | Testis | 1281 |
| WVEERALLE | HLA-A01:01 | CCDC70 | Testis | 1282 |
| LLEGEKALW | HLA-A01:01 | CCDC70 | Testis | 1283 |
| LWEDKTSLW | HLA-A01:01 | CCDC70 | Testis | 1284 |
| LWEEENALW | HLA-A01:01 | CCDC70 | Testis | 1285 |
| SLWEEENAL | HLA-A02:01 | CCDC70 | Testis | 1286 |
| ALWEDKTSL | HLA-A02:01 | CCDC70 | Testis | 1287 |
| SLAASSPSI | HLA-A02:01 | CCDC70 | Testis | 1288 |
| ALWEEEKAL | HLA-A02:01 | CCDC70 | Testis | 1289 |
| ALWERDRNL | HLA-A02:01 | CCDC70 | Testis | 1290 |
| ALWERDRNLL | HLA-A02:01 | CCDC70 | Testis | 1291 |
| ALWEEEKALWV | HLA-A02:01 | CCDC70 | Testis | 1292 |
| ALLEGEKAL | HLA-A02:01 | CCDC70 | Testis | 1293 |
| ALWVEERALL | HLA-A02:01 | CCDC70 | Testis | 1294 |
| MLEDGPHNA | HLA-A02:01 | CCDC70 | Testis | 1295 |
| RLIRKMFSFK | HLA-A03:01 | CCDC70 | Testis | 1296 |
| LIRKMFSFK | HLA-A03:01 | CCDC70 | Testis | 1297 |
| KMFSFKVSR | HLA-A03:01 | CCDC70 | Testis | 1298 |
| ATPPFRLIRK | HLA-A03:01 | CCDC70 | Testis | 1299 |
| ASSPSIRQK | HLA-A03:01 | CCDC70 | Testis | 1300 |
| ATPPFRLIRK | HLA-A11:01 | CCDC70 | Testis | 1301 |
| RLIRKMFSFK | HLA-A11:01 | CCDC70 | Testis | 1302 |
| KTFWKKYRTFWK | HLA-A11:01 | CCDC70 | Testis | 1303 |
| ASSPSIRQK | HLA-A11:01 | CCDC70 | Testis | 1304 |
| ATPPFRLIR | HLA-A11:01 | CCDC70 | Testis | 1305 |
| RLIRKMFSF | HLA-A24:02 | CCDC70 | Testis | 1306 |
| TFWKKYRTF | HLA-A24:02 | CCDC70 | Testis | 1307 |
| RWMGLACF | HLA-A24:02 | CCDC70 | Testis | 1308 |
| PFWEEEKTP | HLA-A24:02 | CCDC70 | Testis | 1309 |
| IFREKIEDF | HLA-A24:02 | CCDC70 | Testis | 1310 |
| RLIRKMPSFK | HLA-A30:01 | CCDC70 | Testis | 1311 |
| LIRKMFSFK | HLA-A30:01 | CCDC70 | Testis | 1312 |
| KYRTFWKEDK | HLA-A30:01 | CCDC70 | Testis | 1313 |
| KYRTFWKED | HLA-A30:01 | CCDC70 | Testis | 1314 |
| ASSPSIRQK | HLA-A30:01 | CCDC70 | Testis | 1315 |
| SSPSIRQKK | HLA-A30:01 | CCDC70 | Testis | 1316 |
| TFRGKIHAFR | HLA-A33:03 | CCDC70 | Testis | 1317 |
| SFWEMEKSFR | HLA-A33:03 | CCDC70 | Testis | 1318 |
| DFREEMWTFR | HLA-A33:03 | CCDC70 | Testis | 1319 |
| EDGPHNANR | HLA-A33:03 | CCDC70 | Testis | 1320 |
| ENALWEEER | HLA-A33:03 | CCDC70 | Testis | 1321 |
| SPSIRQKKL | HLA-B07:02 | CCDC70 | Testis | 1322 |
| SPSIRQKKLM | HLA-B07:02 | CCDC70 | Testis | 1323 |
| SSPSIRQKKL | HLA-B07:02 | CCDC70 | Testis | 1324 |
| IHAFRGQIL | HLA-B07:02 | CCDC70 | Testis | 1325 |
| FRLIRKMFSF | HLA-B08:01 | CCDC70 | Testis | 1326 |
| TFRGKIHAF | HLA-B08:01 | CCDC70 | Testis | 1327 |
| RLIRKMFSF | HLA-B08:01 | CCDC70 | Testis | 1328 |
| ALWEDKTSL | HLA-B08:01 | CCDC70 | Testis | 1329 |
| FWKEDNAL | HLA-B08:01 | CCDC70 | Testis | 1330 |
| ALWERDRNL | HLA-B08:01 | CCDC70 | Testis | 1331 |
| RSLAASSPSI | HLA-B13:02 | CCDC70 | Testis | 1332 |
| MATPPFRLI | HLA-B13:02 | CCDC70 | Testis | 1333 |
| REEMWTFRGKI | HLA-B13:02 | CCDC70 | Testis | 1334 |
| RQKKLMHKL | HLA-B13:02 | CCDC70 | Testis | 1335 |
| KAFREEMKI | HLA-B13:02 | CCDC70 | Testis | 1336 |
| GQILGFWEE | HLA-B13:02 | CCDC70 | Testis | 1337 |
| FSFKVSRWM | HLA-B46:01 | CCDC70 | Testis | 1338 |
| WTFRGKIHAP | HLA-B46:01 | CCDC70 | Testis | 1339 |
| HAFRGQILGF | HLA-B46:01 | CCDC70 | Testis | 1340 |
| VSRWMGLAC | HLA-B46:01 | CCDC70 | Testis | 1341 |
| TFRGKIHAF | HLA-B46:01 | CCDC70 | Testis | 1342 |
| ALWEDKTSL | HLA-B46:01 | CCDC70 | Testis | 1343 |
| MATPPFRLI | HLA-C0L:02 | CCDC70 | Testis | 1344 |
| SLAASSPSI | HLA-C01:02 | CCDC70 | Testis | 1345 |
| FSFKVSRWM | HLA-C01:02 | CCDC70 | Testis | 1346 |
| ALWEDKTSL | HLA-C01:02 | CCDC70 | Testis | 1347 |
| SLWEEENAL | HLA-C01:02 | CCDC70 | Testis | 1348 |
| ALWEEEKAL | HLA-C01:02 | CCDC70 | Testis | 1349 |
| MATPPERLI | HLA-C03:04 | CCDC70 | Testis | 1350 |
| FSFKVSRWM | HLA-C03:04 | CCDC70 | Testis | 1351 |
| MGLACFRSI | HLA-C03:04 | CCDC70 | Testis | 1352 |
| HAFRGQIL | HLA-C03:04 | CCDC70 | Testis | 1353 |
| MATPPFRLI | HLA-C04:01 | CCDC70 | Testis | 1354 |
| FWEEERPFW | HLA-C04:01 | CCDC70 | Testis | 1355 |
| FWMENNGHI | HLA-C04:01 | CCDC70 | Testis | 1356 |
| SFWEMEKSP | HLA-C04:01 | CCDC70 | Testis | 1357 |
| FWEEEKTF | HLA-C04:01 | CCDC70 | Testis | 1358 |
| LWEEENAL | HLA-C04:01 | CCDC70 | Testis | 1359 |
| NRGQRLLAF | HLA-C07:01 | CCDC70 | Testis | 1360 |
| FSFKVSRWM | HLA-C07:01 | CCDC70 | Testis | 1361 |
| FKVSRWMGL | HLA-C07:01 | CCDC70 | Testis | 1362 |
| FRGQILGF | HLA-C07:01 | CCDC70 | Testis | 1363 |
| FRGKIHAF | HLA-C07:01 | CCDC70 | Testis | 1364 |
| ANRGQRLL | HLA-C07:01 | CCDC70 | Testis | 1365 |
| NRGQRLLAF | HLA-C07:02 | CCDC70 | Testis | 1366 |
| TFRGKIHAF | HLA-C07:02 | CCDC70 | Testis | 1367 |
| TFWKKYRTF | HLA-C07:02 | CCDC70 | Testis | 1368 |
| FRLIRKMFSF | HLA-C07:02 | CCDC70 | Testis | 1369 |
| FRGKIHAF | HLA-C07:02 | CCDC70 | Testis | 1370 |
| FRGQILGF | HLA-C07:02 | CCDC70 | Testis | 1371 |
| FREEMWTF | HLA-C07:02 | CCDC70 | Testis | 1372 |
| LSCGDPTYPPY | HLA-A01:01 | CELA2A | Pancreas | 1373 |
| CGDPTYPPY | HLA-A01:01 | CELAZA | Pancreas | 1374 |
| LTDKIQLACL | HLA-A01:01 | CELA2A; | Pancreas | 1375 |
| | | CELA2B | | |
| ALSCGDPTYPPY | HLA-A01:01 | CELA2A | Pancreas | 1376 |
| LTDKIQLAC | HLA-A01:01 | CELA2A; | Pancreas | 1377 |
| | | CELA2B | | |
| NSWPWQVSLQY | HLA-A01:01 | CELA2A; | Pancreas | 1378 |
| | | CELA2B | | |
| LTDKIQLA | HLA-A01:01 | CELA2A; | Pancreas | 1379 |
| | | CELA2B | | |
| SLIANSWVL | HLA-A02:01 | CELA2A; | Pancreas | 1380 |
| | | CELA2B | | |
| ILPNNYPCYV | HLA-A02:01 | CELA2A; | Pancreas | 1381 |
| | | CELA2B | | |
| ALLKLANPV | HLA-A02:01 | CELAZA: | Pancreas | 1382 |
| | | CELA2B | | |
| GLGRHNLYV | HLA-A02:01 | CELA2A | Pancreas | 1383 |
| LLSTLVAGA | HLA-A02:01 | CELA2A; | Pancreas | 1384 |
| | | CELA2B | | |
| LLLSTLVAGA | HLA-A02:01 | CELA2A; | Pancreas | 1385 |
| | | CELA2B | | |
| YIDWINSVI | HLA-A02:01 | CELA2A | Pancreas | 1386 |
| IQLACLPPA | HLA-A02:01 | CELA2A; | Pancreas | 1387 |
| | | CELA2B | | |
| SLIANSWV | HLA-A02:01 | CELA2A; | Pancreas | 1388 |
| | | CELA2B | | |
| LLSTLVAGAL | HLA-A02:01 | CELA2A; | Pancreas | 1389 |
| | | CELA2B | | |
| SLTDKIQLA | HLA-A02:01 | CELA2A; | Pancreas | 1390 |
| | | CELA2B | | |
| VLQQGRLLV | HLA-A02:01 | CELA2A | Pancreas | 1391 |
| KLANPVSL | HLA-A02:01 | CELA2A; | Pancreas | 1392 |
| | | CELA2B | | |
| SLTDKIQL | HLA-A02:01 | CELA2A; | Pancreas | 1393 |
| | | CELA2B | | |
| YVAESGSLAV | HLA-A02:01 | CELA2A; | Pancreas | 1394 |
| | | CELA2B | | |
| VLQQGRLLVV | HLA-A02:01 | CELA2A | Pancreas | 1395 |
| KLANPVSLTDK | HLA-A03:01 | CELA2A; | Pancreas | 1396 |
| | | CELA2B | | |
| SSAWWGSSVK | HLA-A03:01 | CELA2A | Pancreas | 1397 |
| RTYRVGLGR | HLA-A03:01 | CELA2A | Pancreas | 1398 |
| LKLANPVSLTDK | HLA-A03:01 | CELA2A; | Pancreas | 1399 |
| | | CELA2B | | |
| SVFTRVSNY | HLA-A03:01 | CELA2A | Pancreas | 1400 |
| SVSKIVVHK | HLA-A11:01 | CELAZA; | Pancreas | 1401 |
| | | CELA2B | | |
| GSLAVSVSK | HLA-A11:01 | CELA2A; | Pancreas | 1402 |
| | | CELA2B | | |
| SGSLAVSVSK | HLA-A11:01 | CELA2A; | Pancreas | 1403 |
| | | CELA2B | | |
| PTYPPYVTR | HLA-A11:01 | CELA2A | Pancreas | 1404 |
| RWQVHGIVSF | HLA-A24:02 | CELA2A | Pancreas | 1405 |
| TYPPYVTRV | HLA-A24:02 | CELA2A | Pancreas | 1406 |
| NYYHKPSVF | HLA-A24:02 | CELA2A | Pancreas | 1407 |
| NYIDWINSVI | HLA-A24:02 | CELA2A | Pancreas | 1408 |
| NYIDWINSV | HLA-A24:02 | CELA2A | Pancreas | 1409 |
| SSRTYRVGL | HLA-A30:01 | CELA2A | Pancreas | 1410 |
| GSLAVSVSK | HLA-A30:01 | CELA2A; | Pancreas | 1411 |
| | | CELA2B | | |
| SVKTSMICA | HLA-A30:01 | CELA2A | Pancreas | 1412 |
| RTLLLSTLV | HLA-A30:01 | CELA2A; | Pancreas | 1413 |
| | | CELA2B | | |
| KGNDIALLK | HLA-A30:01 | CELA2A; | Pancreas | 1414 |
| | | CELA2B | | |
| SVSKIVVHK | HLA-A30:01 | CELA2A; | Pancreas | 1415 |
| | | CELA2B | | |
| SVFTRVSNY | HLA-A30:01 | CELA2A | Pancreas | 1416 |
| CISSSRTYR | HLA-A33:03 | CELA2A | Pancreas | 1417 |
| HCISSSRTYR | HLA-A33:03 | CELA2A | Pancreas | 1418 |
| YYHKPSVFTR | HLA-A33:03 | CELA2A | Pancreas | 1419 |
| NYYHKPSVFTR | HLA-A33:03 | CELA2A | Pancreas | 1420 |
| PTYPPYVTR | HLA-A33:03 | CELA2A | Pancreas | 1421 |
| RPNSWPWQVSL | HLA-B07:02 | CELA2A; | Pancreas | 1422 |
| | | CELA2B | | |
| YPPYVTRVV | HLA-B07:02 | CELA2A | Pancreas | 1423 |
| ARPNSWPWQVSL | HLA-B07:02 | CELA2A; | Pancreas | 1424 |
| | | CELA2B | | |
| RPNSWPWQV | HLA-B07:02 | CELA2A; | Pancreas | 1425 |
| | | CELA2B | | |
| LPPAGTIL | HLA-B07:02 | CELA2A; | Pancreas | 1426 |
| | | CELA2B | | |
| MIRTLLLSTL | HLA-B08:01 | CELA2A; | Pancreas | 1427 |
| | | CELA2B | | |
| LLKLANPVSL | HLA-B08:01 | CELA2A; | Pancreas | 1428 |
| | | CELA2B | | |
| SSRTYRVGL | HLA-B08:01 | CELA2A | Pancreas | 1429 |
| SLTDKIQL | HLA-B08:01 | CELA2A; | Pancreas | 1430 |
| | | CELA2B | | |
| VLQQGRLL | HLA-B08:01 | CELA2A | Pancreas | 1431 |
| KLANPVSL | HLA-B08:01 | CELA2A; | Pancreas | 1432 |
| | | CELA2B | | |
| RTLLLSTLV | HLA-B13:02 | CELA2A; | Pancreas | 1433 |
| | | CELA2B | | |
| IDWINSVIA | HLA-B13:02 | CELAZA | Pancreas | 1434 |
| SNYIDWINSV | HLA-B13:02 | CELA2A | Pancreas | 1435 |
| RVSNYIDWI | HLA-B13:02 | CELA2A | Pancreas | 1436 |
| SLAVSVSKI | HLA-B13:02 | CELA2A; | Pancreas | 1437 |
| | | CELA2B | | |
| NQISKGNDI | HLA-B13:02 | CELA2A | Pancreas | 1438 |
| YATCSSSAW | HLA-B46:01 | CELA2A | Pancreas | 1439 |
| WQVHGIVSF | HLA-B46:01 | CELA2A | Pancreas | 1440 |
| SVFTRVSNY | HLA-B46:01 | CELA2A | Pancreas | 1441 |
| SSAWWGSSV | HLA-B46:01 | CELA2A | Pancreas | 1442 |
| NSWPWQVSL | HLA-B46:01 | CELA2A; | Pancreas | 1443 |
| | | CELA2B | | |
| CLPPAGTIL | HLA-C01:02 | CELA2A; | Pancreas | 1444 |
| | | CELA2B | | |
| YIDWINSVI | HLA-C01:02 | CELA2A | Pancreas | 1445 |
| NSWPWQVSL | HLA-C01:02 | CELA2A; | Pancreas | 1446 |
| | | CELA2B | | |
| SAWWGSSV | HLA-C01:02 | CELA2A | Pancreas | 1447 |
| SSAWWGSSV | HLA-C03:04 | CELA2A | Pancreas | 1448 |
| YATCSSSAW | HLA-C03:04 | CELA2A | Pancreas | 1449 |
| LSTLVAGAL | HLA-C03:04 | CELA2A; | Pancreas | 1450 |
| | | CELA2B | | |
| NSWPWQVSL | HLA-C03:04 | CELA2A; | Pancreas | 1451 |
| | | CELA2B | | |
| LANPVSLTD | HLA-C03:04 | CELA2A; | Pancreas | 1452 |
| | | CELA2B | | |
| YIDWINSVI | HLA-C04:01 | CELA2A | Pancreas | 1453 |
| WYHTCGGSL | HLA-C04:01 | CELA2A; | Pancreas | 1454 |
| | | CELA2B | | |
| CLPPAGTIL | HLA-C04:01 | CELA2A; | Pancreas | 1455 |
| | | CELA2B | | |
| NYYHKPSVF | HLA-C04:01 | CELA2A | Pancreas | 1456 |
| TYPPYVTRV | HLA-C04:01 | CELA2A | Pancreas | 1457 |
| YYHKPSVF | HLA-C04:01 | CELAZA | Pancreas | 1458 |
| NYIDWINSV | HLA-C07:01 | CELA2A | Pancreas | 1459 |
| IRTLLLSTL | HLA-C07:01 | CELA2A; | Pancreas | 1460 |
| | | CELA2B | | |
| YRVGLGRHNL | HLA-C07:01 | CELA2A | Pancreas | 1461 |
| NSWPWQVSL | HLA-C07:01 | CELA2A; | Pancreas | 1462 |
| | | CELA2B | | |
| TNGAVPDVL | HLA-C07:01 | CELA2A | Pancreas | 1463 |
| LANPVSLTD | HLA-C07:01 | CELA2A; | Pancreas | 1464 |
| | | CELA2B | | |
| NYYHKPSVF | HLA-C07:02 | CELA2A | Pancreas | 1465 |
| TYPPYVTRV | HLA-C07:02 | CELA2A | Pancreas | 1466 |
| NYIDWINSV | HLA-C07:02 | CELA2A | Pancreas | 1467 |
| YYHKPSVF | HLA-C07:02 | CELA2A | Pancreas | 1468 |
| ARPNSWPWQV | HLA-C07:02 | CELA2A; | Pancreas | 1469 |
| | | CELA2B | | |
| LTSVIGQNYY | HLA-A01:01 | CELA2B | Pancreas | 1470 |
| LTSVLGCNY | HLA-A01:01 | CELA2B | Pancreas | 1471 |
| LTSVLGCNYYY | HLA-A01:01 | CELA2B | Pancreas | 1472 |
| YSSNGQWY | HLA-A01:01 | CELA2B | Pancreas | 1473 |
| MLGQHNLYV | HLA-A02:01 | CELA2B | Pancreas | 1474 |
| VMLGQHNLYV | HLA-A02:01 | CELA2B | Pancreas | 1475 |
| LVAGALSCGV | HLA-A02:01 | CELA2B | Pancreas | 1476 |
| MLGQHNLYVA | HLA-A02:01 | CELA2B | Pancreas | 1477 |
| VLQRCSLIL | HLA-A02:01 | CELA2B | Pancreas | 1478 |
| YRVMLGQHNLYV | HLA-A02:01 | CELA2B | Pancreas | 1479 |
| ALSCGVSTYA | HLA-A02:01 | CELA2B | Pancreas | 1480 |
| FVRDLCSSQLEL | HLA-A02:01 | CELA2B | Pancreas | 1481 |
| SLILFFVRDL | HLA-A02:01 | CELA2B | Pancreas | 1482 |
| RVMLGQHNLYV | HLA-A02:01 | CELA2B | Pancreas | 1483 |
| ALPDDLKQG | HLA-A02:01 | CELA2B | Pancreas | 1484 |
| DLKQGQLLV | HLA-A02:01 | CELA2B | Pancreas | 1485 |
| DLCSSQLEL | HLA-A02:01 | CELA2B | Pancreas | 1486 |
| SQLELTGV | HLA-A02:01 | CELA2B | Pancreas | 1487 |
| ALPDDLKQGQL | HLA-A02:01 | CELA2B | Pancreas | 1488 |
| AGSSGIYRV | HLA-A02:01 | CELA2B | Pancreas | 1489 |
| SVLGCNYYYK | HLA-A03:01 | CELA2B | Pancreas | 1490 |
| VLGCNYYYK | HLA-A03:01 | CELA2B | Pancreas | 1491 |
| SSGWWGSTVK | HLA-A03:01 | CELA2B | Pancreas | 1492 |
| SIFTRVSNY | HLA-A03:01 | CELA2B | Pancreas | 1493 |
| SVLGCNYYY | HLA-A03:01 | CELA2B | Pancreas | 1494 |
| SVLQQNYYYK | HLA-A11:01 | CELA2B | Pancreas | 1495 |
| STYAPDMSR | HLA-A11:01 | CELA2B | Pancreas | 1496 |
| SSQWWGSTVK | HLA-A11:01 | CELA2B | Pancreas | 1497 |
| SSSGWWGSTVK | HLA-A11:01 | CELA2B | Pancreas | 1498 |
| GVSAGSSGIYR | HLA-A11:01 | CELA2B | Pancreas | 1499 |
| NYYYKPSIF | HLA-A24:02 | CELA2B | Pancreas | 1500 |
| YYKPSIFTRV | HLA-A24:02 | CELA2B | Pancreas | 1501 |
| CNYYYKPSIF | HLA-A24:02 | CELA2B | Pancreas | 1502 |
| TYAPDMSRM | HLA-A24:02 | CELA2B | Pancreas | 1503 |
| YYYKPSIF | HLA-A24:02 | CELA2B | Pancreas | 1504 |
| AAHCIRQIK | HLA-A30:01 | CELA2B | Pancreas | 1505 |
| KVLQRCSLI | HLA-A30:01 | CELA2B | Pancreas | 1506 |
| RVMLGQHNI | HLA-A30:01 | CELA2B | Pancreas | 1507 |
| MSRMLGGEEA | HLA-A30:01 | CELA2B | Pancreas | 1508 |
| SVLGCNYYYK | HLA-A30:01 | CELA2B | Pancreas | 1509 |
| SIFTRVSNY | HLA-A30:01 | CELA2B | Pancreas | 1510 |
| YYKPSIFTR | HLA-A33:03 | CELA2B | Pancreas | 1511 |
| YYYKPSIFTR | HLA-A33:03 | CELA2B | Pancreas | 1512 |
| STYAPDMSR | HLA-A33:03 | CELA2B | Pancreas | 1513 |
| NYYYKPSIFTR | HLA-A33:03 | CELA2B | Pancreas | 1514 |
| RVMLGQHNL | HLA-B07:02 | CELA2B | Pancreas | 1515 |
| KPSIFTRVS | HLA-B07:02 | CELA2B | Pancreas | 1516 |
| FVRDLCSSQL | HLA-B07:02 | CELA2B | Pancreas | 1517 |
| APDMSRML | HLA-B07:02 | CELA2B | Pancreas | 1518 |
| LPDDLKQGQL | HLA-B07:02 | CELA2B | Pancreas | 1519 |
| APDMSRMLG | HLA-B07:02 | CELA2B | Pancreas | 1520 |
| WGRLQTNGAL | HLA-B08:01 | CELA2B | Pancreas | 1521 |
| IIKKAHKVL | HLA-B08:01 | CELA2B | Pancreas | 1522 |
| KVLQRCSL | HLA-B08:01 | CELA2B | Pancreas | 1523 |
| DLKQGQLL | HLA-B08:01 | CELA2B | Pancreas | 1524 |
| QIIKAHKVL | HLA-B08:01 | CELA2B | Pancreas | 1525 |
| GQWYHTCGGSLI | HLA-B13:02 | CELA2B | Pancreas | 1526 |
| CNYYYKPSI | HLA-B13:02 | CELA2B | Pancreas | 1527 |
| SNYNDWINSV | HLA-B13:02 | CELA2B | Pancreas | 1528 |
| RQIIKAHKV | HLA-B13:02 | CELA2B | Pancreas | 1529 |
| RVSNYNDWI | HLA-B13:02 | CELA2B | Pancreas | 1530 |
| AGSSGIYRV | HLA-B13:02 | CELA2B | Pancreas | 1531 |
| VSAGSSGIY | HLA-B46:01 | CELA2B | Pancreas | 1532 |
| SSSGIYRVM | HLA-B46:01 | CELA2B | Pancreas | 1533 |
| ALSCGVSTY | HLA-B46:01 | CELA2B | Pancreas | 1534 |
| AAHCISSSG | HLA-B46:01 | CELA2B | Pancreas | 1535 |
| VSKGNDIAL | HLA-B46:01 | CELA2B | Pancreas | 1536 |
| YAPDMSRML | HLA-C01:02 | CELA2B | Pancreas | 1537 |
| VLQRCSLIL | HLA-C01:02 | CELA2B | Pancreas | 1538 |
| RVMLGQHNL | HLA-C01:02 | CELA2B | Pancreas | 1539 |
| FVRDLCSSQL | HLA-C01:02 | CELA2B | Pancreas | 1540 |
| YAPDMSRM | HLA-C01:02 | CELA2B | Pancreas | 1541 |
| DLCSSQLEL | HLA-C01:02 | CELA2B | Pancreas | 1542 |
| YAPDMSRML | HLA-C03:04 | CELA2B | Pancreas | 1543 |
| SSSGIYRVM | HLA-C03:04 | CELA2B | Pancreas | 1544 |
| HGIGSLTSV | HLA-C03:04 | CELA2B | Pancreas | 1545 |
| VSKGNDIAL | HLA-C03:04 | CELA2B | Pancreas | 1546 |
| QIIKAHKVL | HLA-C03:04 | CELA2B | Pancreas | 1547 |
| YNDWINSVI | HLA-C04:01 | CELA2B | Pancreas | 1548 |
| FFVRDLCSSQL | HLA-C04:01 | CELA2B | Pancreas | 1549 |
| VRDLCSSQL | HLA-C04:01 | CELA2B | Pancreas | 1550 |
| NYYYKPSIF | HLA-C04:01 | CELA2B | Pancreas | 1551 |
| NYNDWINSV | HLA-C04:01 | CELA2B | Pancreas | 1552 |
| YYYKPSIF | HLA-C04:01 | CELA2B | Pancreas | 1553 |
| NYNDWINSV | HLA-C07:01 | CELA2B | Pancreas | 1554 |
| YRVMLGQHNL | HLA-C07:01 | CELA2B | Pancreas | 1555 |
| VRDLCSSQL | HLA-C07:01 | CELA2B | Pancreas | 1556 |
| NYYYKPSIF | HLA-C07:01 | CELA2B | Pancreas | 1557 |
| SSGIYRVML | HLA-C07:01 | CELA2B | Pancreas | 1558 |
| RVMLGQHNI | HLA-C07:01 | CELA2B | Pancreas | 1559 |
| QRCSLILFF | HLA-C07:01 | CELA2B | Pancreas | 1560 |
| NYYYKPSIF | HLA-C07:02 | CELA2B | Pancreas | 1561 |
| TYAPDMSRM | HLA-C07:02 | CELA2B | Pancreas | 1562 |
| NYNDWINSV | HLA-C07:02 | CELA2B | Pancreas | 1563 |
| YYKPSIFTR | HLA-C07:02 | CELA2B | Pancreas | 1564 |
| YYYKPSIF | HLA-C07:02 | CELA2B | Pancreas | 1565 |
| TIDAKELKV | HLA-A01:01 | CETN1 | Testis | 1566 |
| ISFNDFLAVM | HLA-A01:01 | CETN1 | Testis | 1567 |
| LTEDQKQEV | HLA-A01:01 | CETN1 | Testis | 1568 |
| FNDFLAVMTQKM | HLA-A01:01 | CETN1 | Testis | 1569 |
| TIDAKELK | HLA-A01:01 | CETN1 | Testis | 1570 |
| KISFNDFLAV | HLA-A02:01 | CETN1 | Testis | 1571 |
| FLAVMTQKM | HLA-A02:01 | CETN1 | Testis | 1572 |
| ISFNDFLAV | HLA-A02:01 | CETN1 | Testis | 1573 |
| KISFNDFLA | HLA-A02:01 | CETN1 | Testis | 1574 |
| GKISFNDFLAV | HLA-A02:01 | CETN1 | Testis | 1575 |
| DFLAVMTQKM | HLA-A02:01 | CETN1 | Testis | 1576 |
| TGKISFNDFLAV | HLA-A02:01 | CETN1 | Testis | 1577 |
| FLAVMTQKMS | HLA-A02:01 | CETN1 | Testis | 1578 |
| KISFNDFLAVM | HLA-A02:01 | CETN1 | Testis | 1579 |
| RLFDDDETG | HLA-A02:01 | CETN1 | Testis | 1580 |
| TIDAKELKV | HLA-A02:01 | CETN1 | Testis | 1581 |
| ELTEDQKQEV | HLA-A02:01 | CETN1 | Testis | 1582 |
| RLFDDDETGKI | HLA-A02:01 | CETN1 | Testis | 1583 |
| RLFDDDETGK | HLA-A02:01 | CETN1 | Testis | 1584 |
| GTIDAKELKV | HLA-A02:01 | CETN1 | Testis | 1585 |
| NLKRVANEL | HLA-A02:01 | CETN1 | Testis | 1586 |
| AVMTQKMSEK | HLA-A03:01 | CETN1 | Testis | 1587 |
| KPSAASTGQK | HLA-A03:01 | CETN1 | Testis | 1588 |
| AMRALGFEPRK | HLA-A03:01 | CETN1 | Testis | 1589 |
| RLFDDDETGK | HLA-A03:01 | CETN1 | Testis | 1590 |
| RALGFEPRK | HLA-A03:01 | CETN1 | Testis | 1591 |
| AVMTQKMSEK | HLA-A11:01 | CETN1 | Testis | 1592 |
| GTIDAKELK | HLA-A11:01 | CETN1 | Testis | 1593 |
| SGTIDAKELK | HLA-A11:01 | CETN1 | Testis | 1594 |
| RALGFEPRK | HLA-A11:01 | CETN1 | Testis | 1595 |
| EILKAPRLF | HLA-A24:02 | CETN1 | Testis | 1596 |
| SFNDFLAVM | HLA-A24:02 | CETN1 | Testis | 1597 |
| ILKAFRLF | HLA-A24:02 | CETN1 | Testis | 1598 |
| EVREAFDLF | HLA-A24:02 | CETN1 | Testis | 1599 |
| GQKRKVAPK | HLA-A30:01 | CETN1 | Testis | 1600 |
| RALGFEPRK | HLA-A30:01 | CETN1 | Testis | 1601 |
| AMRALGFEPRK | HLA-A30:01 | CETN1 | Testis | 1602 |
| GTIDAKELK | HLA-A30:01 | CETN1 | Testis | 1603 |
| RLFDDDETGK | HLA-A30:01 | CETN1 | Testis | 1604 |
| EVNEEEFLR | HLA-A33:03 | CETN1 | Testis | 1605 |
| AMRALGFEPR | HLA-A33:03 | CETN1 | Testis | 1606 |
| DFLAVMTQK | HLA-A33:03 | CETN1 | Testis | 1607 |
| DAKELKVAMR | HLA-A33:03 | CETN1 | Testis | 1608 |
| SAASTGQKR | HLA-A33:03 | CETN1 | Testis | 1609 |
| EPRKEEMKKM | HLA-B07:02 | CETN1 | Testis | 1610 |
| RVANELGENL | HLA-B07:02 | CETN1 | Testis | 1611 |
| KPSAASTGQ | HLA-B07:02 | CETN1 | Testis | 1612 |
| APKPELTED | HLA-B07:02 | CETN1 | Testis | 1613 |
| RKVAPKPEL | HLA-B07:02 | CETN1 | Testis | 1614 |
| EEFLRIMKKTSL | HLA-B08:01 | CETN1 | Testis | 1615 |
| NLKRVANEL | HLA-B08:01 | CETN1 | Testis | 1616 |
| FKNLKRVANEL | HLA-B08:01 | CETN1 | Testis | 1617 |
| DAKELKVAM | HLA-B08:01 | CETN1 | Testis | 1618 |
| TQQKRKVAP | HLA-B08:01 | CETN1 | Testis | 1619 |
| EILKAFRL | HLA-B08:01 | CETN1 | Testis | 1620 |
| ISFNDFLAV | HLA-B13:02 | CETN1 | Testis | 1621 |
| REAFDLFDV | HLA-B13:02 | CETN1 | Testis | 1622 |
| FDVDGSGTI | HLA-B13:02 | CETN1 | Testis | 1623 |
| TIDAKELKV | HLA-B13:02 | CETN1 | Testis | 1624 |
| ASTGQKRKV | HLA-B13:02 | CETN1 | Testis | 1625 |
| FLAVMTQKM | HLA-B46:01 | CETN1 | Testis | 1626 |
| ISFNDFLAV | HLA-B46:01 | CETN1 | Testis | 1627 |
| ISFNDFLAVM | HLA-B46:01 | CETN1 | Testis | 1628 |
| VANELGEN | HLA-B46:01 | CETN1 | Testis | 1629 |
| VANELGENL | HLA-B46:01 | CETN1 | Testis | 1630 |
| DAKELKVAM | HLA-B46:01 | CETN1 | Testis | 1631 |
| FLAVMTQKM | HLA-C01:02 | CETN1 | Testis | 1632 |
| ISFNDFLAV | HLA-C01:02 | CETN1 | Testis | 1633 |
| SFNDFLAVM | HLA-C01:02 | CETN1 | Testis | 1634 |
| VANELGENL | HLA-C01:02 | CETN1 | Testis | 1635 |
| VAPKPELTED | HLA-C01:02 | CETN1 | Testis | 1636 |
| VAPKPELTE | HLA-C01:02 | CETN1 | Testis | 1637 |
| ISFNDFLAV | HLA-C03:04 | CETN1 | Testis | 1638 |
| FLAVMTQKM | HLA-C03:04 | CETN1 | Testis | 1639 |
| VANELGENL | HLA-C03:04 | CETN1 | Testis | 1640 |
| GTIDAKEL | HLA-C03:04 | CETN1 | Testis | 1641 |
| KVAPKPEL | HLA-C03:04 | CETN1 | Testis | 1642 |
| SFNDFLAVM | HLA-C04:01 | CETN1 | Testis | 1643 |
| LFDVDGSGTI | HLA-C04:01 | CETN1 | Testis | 1644 |
| FLAVMTQKM | HLA-C04:01 | CETN1 | Testis | 1645 |
| AFDLFDVDG | HLA-C04:01 | CETN1 | Testis | 1646 |
| SFNDFLAVM | HLA-C07:01 | CETN1 | Testis | 1647 |
| ISFNDFLAV | HLA-C07:01 | CETN1 | Testis | 1648 |
| FLAVMTQKM | HLA-C07:01 | CETN1 | Testis | 1649 |
| REGTGKISF | HLA-C07:01 | CETN1 | Testis | 1650 |
| APKPELTED | HLA-C07:01 | CETN1 | Testis | 1651 |
| KVAPKPEL | HLA-C07:01 | CETN1 | Testis | 1652 |
| SFNDFLAVM | HLA-C07:02 | CETN1 | Testis | 1653 |
| FLAVMTQKM | HLA-C07:02 | CETN1 | Testis | 1654 |
| ISFNDFLAVM | HLA-C07:02 | CETN1 | Testis | 1655 |
| KRKVAPKPEL | HLA-C07:02 | CETN1 | Testis | 1656 |
| KVAPKPEL | HLA-C07:02 | CETN1 | Testis | 1657 |
| RKVAPKPEL | HLA-C07:02 | CETN1 | Testis | 1658 |
| WTAHAIRDFY | HLA-A01:01 | CLDN6 | Ovarian | 1659 |
| CWTAHAIIRDFY | HLA-A01:01 | CLDN6 | Ovarian | 1660 |
| LVALFGLLVY | HLA-A01:01 | CLDN6 | Ovarian | 1661 |
| PSEYPTKNY | HLA-A01:01 | CLDN6 | Ovarian | 1662 |
| ALFGLLVY | HLA-A01:01 | CLDN6 | Ovarian | 1663 |
| ALFGLLVYL | HLA-A02:01 | CLDN6 | Ovarian | 1664 |
| VLTSGIVFV | HLA-A02:01 | CLDN6 | Ovarian | 1665 |
| TLLGWVNGL | HLA-A02:01 | CLDN6 | Ovarian | 1666 |
| TLIPVCWTA | HLA-A02:01 | CLDN6 | Ovarian | 1667 |
| FVISGVLTL | HLA-A02:01 | CLDN6 | Ovarian | 1668 |
| YMARYSTSA | HLA-A02:01 | CLDN6 | Ovarian | 1669 |
| ALLVALFGL | HLA-A02:01 | CLDN6 | Ovarian | 1670 |
| ALFGLLVYLA | HLA-A02:01 | CLDN6 | Ovarian | 1671 |
| FVISGVLTLIPV | HLA-A02:01 | CLDN6 | Ovarian | 1672 |
| ILGVVLTLL | HLA-A02:01 | CLDN6 | Ovarian | 1673 |
| GLLVYLAGA | HLA-A02:01 | CLDN6 | Ovarian | 1674 |
| LVSCALPMWK | HLA-A03:01 | CLDN6 | Ovarian | 1675 |
| VSCALPMWK | HLA-A03:01 | CLDN6 | Ovarian | 1676 |
| GLLVYLAGAK | HLA-A03:01 | CLDN6 | Ovarian | 1677 |
| ALFGLLVYL | HLA-A03:01 | CLDN6 | Ovarian | 1678 |
| ALFGLLVY | HLA-A03:01 | CLDN6 | Ovarian | 1679 |
| LVALFGLLVY | HLA-A03:01 | CLDN6 | Ovarian | 1680 |
| VSCALPMWK | HLA-A11:01 | CLDN6 | Ovarian | 1681 |
| STSAPAISR | HLA-A11:01 | CLDN6 | Ovarian | 1682 |
| LVSCALPMWK | HLA-A11:01 | CLDN6 | Ovarian | 1683 |
| ALFGLLVYL | HLA-A11:01 | CLDN6 | Ovarian | 1684 |
| MWKALLFLTL | HLA-A24:02 | CLDN6 | Ovarian | 1685 |
| RYSTSAPAI | HLA-A24:02 | CLDN6 | Ovarian | 1686 |
| LYLGWAASGL | HLA-A24:02 | CLDN6 | Ovarian | 1687 |
| VIALLVALF | HLA-A24:02 | CLDN6 | Ovarian | 1688 |
| VFVISGVLTL | HLA-A24:02 | CLDN6 | Ovarian | 1689 |
| KARLVLTSG | HLA-A30:01 | CLDN6 | Ovarian | 1690 |
| KARLVLTSGI | HLA-A30:01 | CLDN6 | Ovarian | 1691 |
| MARYSTSAPA | HLA-A30:01 | CLDN6 | Ovarian | 1692 |
| RGPSEYPTK | HLA-A30:01 | CLDN6 | Ovarian | 1693 |
| ALFGLLVYL | HLA-A30:01 | CLDN6 | Ovarian | 1694 |
| GVLTLIPVC | HLA-A30:01 | CLDN6 | Ovarian | 1695 |
| STSAPAISR | HLA-A33:03 | CLDN6 | Ovarian | 1696 |
| YSTSAPAISR | HLA-A33:03 | CLDN6 | Ovarian | 1697 |
| FYNPLVAEAQKR | HLA-A33:03 | CLDN6 | Ovarian | 1698 |
| TSAPAISR | HLA-A33:03 | CLDN6 | Ovarian | 1699 |
| WTAHAIIR | HLA-A33:03 | CLDN6 | Ovarian | 1700 |
| LPMWKVTAF | HLA-B07:02 | CLDN6 | Ovarian | 1701 |
| ALPMWKVTAF | HLA-B07:02 | CLDN6 | Ovarian | 1702 |
| LPMWKVTAFI | HLA-B07:02 | CLDN6 | Ovarian | 1703 |
| LPMWKALLF | HLA-B07:02 | CLDN6 | Ovarian | 1704 |
| LPMWKALLFL | HLA-B07:02 | CLDN6 | Ovarian | 1705 |
| LPMWKVTAF | HLA-B08:01 | CLDN6 | Ovarian | 1706 |
| LPMWKVTAFI | HLA-B08:01 | CLDN6 | Ovarian | 1707 |
| LPMWKALLFLTL | HLA-B08:01 | CLDN6 | Ovarian | 1708 |
| DSKARLVL | HLA-B08:01 | CLDN6 | Ovarian | 1709 |
| VIALLVAL | HLA-B08:01 | CLDN6 | Ovarian | 1710 |
| RALCVIALLV | HLA-B13:02 | CLDN6 | Ovarian | 1711 |
| LTSGIVFVI | HLA-B13:02 | CLDN6 | Ovarian | 1712 |
| SEYPTKNYV | HLA-B13:02 | CLDN6 | Ovarian | 1713 |
| ALCVIALLV | HLA-B13:02 | CLDN6 | Ovarian | 1714 |
| ALFGLLVYL | HLA-B13:02 | CLDN6 | Ovarian | 1715 |
| VLTSGIVFV | HLA-B13:02 | CLDN6 | Ovarian | 1716 |
| FVISGVLTL | HLA-B46:01 | CLDN6 | Ovarian | 1717 |
| MASAGMQIL | HLA-B46:01 | CLDN6 | Ovarian | 1718 |
| VALFQLLVY | HLA-B46:01 | CLDN6 | Ovarian | 1719 |
| IIRDFYNPL | HLA-B46:01 | CLDN6 | Ovarian | 1720 |
| ISRGPSEY | HLA-B46:01 | CLDN6 | Ovarian | 1721 |
| TAHAIIRDF | HLA-B46:01 | CLDN6 | Ovarian | 1722 |
| FVISGVLTL | HLA-C01:02 | CLDN6 | Ovarian | 1723 |
| YLGWAASGL | HLA-C01:02 | CLDN6 | Ovarian | 1724 |
| ALPMWKALL | HLA-C01:02 | CLDN6 | Ovarian | 1725 |
| ALPMWKAL | HLA-C01:02 | CLDN6 | Ovarian | 1726 |
| ALPMWKVTAF | HLA-C01:02 | CLDN6 | Ovarian | 1727 |
| FVISGVLTL | HLA-C03:04 | CLDN6 | Ovarian | 1728 |
| MASAGMQIL | HLA-C03:04 | CLDN6 | Ovarian | 1729 |
| CALPMWKAL | HLA-C03:04 | CLDN6 | Ovarian | 1730 |
| KALLFLTL | HLA-C03:04 | CLDN6 | Ovarian | 1731 |
| LPMWKALLF | HLA-C04:01 | CLDN6 | Ovarian | 1732 |
| RYSTSAPAI | HLA-C04:01 | CLDN6 | Ovarian | 1733 |
| YLGWAASGL | HLA-C04:01 | CLDN6 | Ovarian | 1734 |
| LFGLLVYL | HLA-C04:01 | CLDN6 | Ovarian | 1735 |
| ILGVVLTLL | HLA-C04:01 | CLDN6 | Ovarian | 1736 |
| VFVISGVL | HLA-C04:01 | CLDN6 | Ovarian | 1737 |
| IRDFYNPLV | HLA-C07:01 | CLDN6 | Ovarian | 1738 |
| FVISGVLTL | HLA-C07:01 | CLDN6 | Ovarian | 1739 |
| ARYSTSAPAI | HLA-C07:01 | CLDN6 | Ovarian | 1740 |
| RDFYNPLVA | HLA-C07:01 | CLDN6 | Ovarian | 1741 |
| TSGIVFVI | HLA-C07:01 | CLDN6 | Ovarian | 1742 |
| SRGPSEYP | HLA-C07:01 | CLDN6 | Ovarian | 1743 |
| RYSTSAPAI | HLA-C07:02 | CLDN6 | Ovarian | 1744 |
| FVISGVLTL | HLA-C07:02 | CLDN6 | Ovarian | 1745 |
| IRDFYNPLV | HLA-C07:02 | CLDN6 | Ovarian | 1746 |
| QKRELGASL | HLA-C07:02 | CLDN6 | Ovarian | 1747 |
| SRGPSEYPT | HLA-C07:02 | CLDN6 | Ovarian | 1748 |
| YTYDEYTKGY | HLA-A01:01 | COL10A1 | Breast | 1749 |
| FTCQIPGIYY | HLA-A01:01 | COL10A1 | Breast | 1750 |
| FTCQIPGIY | HLA-A01:01 | COL10A1 | Breast | 1751 |
| MYTYDEYTKGY | HLA-A01:01 | COL10A1 | Breast | 1752 |
| NAESNGLY | HLA-A01:01 | COL10A1 | Breast | 1753 |
| GSDGKPGY | HLA-A01:01 | COL10A1 | Breast | 1754 |
| LTENDQVWL | HLA-A01:01 | COL10A1 | Breast | 1755 |
| GIYYFSYHV | HLA-A02:01 | COL10A1 | Breast | 1756 |
| MLPQIPFLL | HLA-A02:01 | COL10A1 | Breast | 1757 |
| NLVHGVFYA | HLA-A02:01 | COL10A1 | Breast | 1758 |
| FLLLVSLNL | HLA-A02:01 | COL10A1 | Breast | 1759 |
| LLLVSLNLV | HLA-A02:01 | COL10A1 | Breast | 1760 |
| FLLLVSLNLV | HLA-A02:01 | COL10A1 | Breast | 1761 |
| ILSKAYPAL | HLA-A02:01 | COL10A1 | Breast | 1762 |
| MLPQIPFLLI | HLA-A02:01 | COL10A1 | Breast | 1763 |
| MLPQIPFLLLV | HLA-A02:01 | COL10A1 | Breast | 1764 |
| GLYKNGTPV | HLA-A02:01 | COL10A1 | Breast | 1765 |
| GLDGPKGNPGL | HLA-A02:01 | COL10A1 | Breast | 1766 |
| SLSGTPLVSA | HLA-A02:01 | COL10A1 | Breast | 1767 |
| SLSGTPLV | HLA-A02:01 | COL10A1 | Breast | 1768 |
| GLYSSEYV | HLA-A02:01 | COL10A1 | Breast | 1769 |
| GLPGPPGPSA | HLA-A02:01 | COL10A1 | Breast | 1770 |
| GTHVWVGLYK | HLA-A03:01 | COL10A1 | Breast | 1771 |
| VMYTYDEYTK | HLA-A03:01 | COL10A1 | Breast | 1772 |
| VSAFTVILSK | HLA-A03:01 | COL10A1 | Breast | 1773 |
| SAFTVILSK | HLA-A03:01 | COL10A1 | Breast | 1774 |
| AIGTPIPFDK | HLA-A03:01 | COL10A1 | Breast | 1775 |
| AVMPEGFIK | HLA-A03:01 | COL10A1 | Breast | 1776 |
| GLYKNGTPVMY | HLA-A03:01 | COL10A1 | Breast | 1777 |
| AVMPEGFIK | HLA-A11:01 | COL10A1 | Breast | 1778 |
| SAFTVILSK | HLA-A11:01 | COL10A1 | Breast | 1779 |
| GTHVWVGLYK | HLA-A11:01 | COL10A1 | Breast | 1780 |
| VSAFTVILSK | HLA-A11:0] | COL10A1 | Breast | 1781 |
| CQIPGIYYF | HLA-A24:02 | COL10A1 | Breast | 1782 |
| YYFSYHVHV | HLA-A24:02 | COL10A1 | Breast | 1783 |
| MLPQIPFLL | HLA-A24:02 | COL10A1 | Breast | 1784 |
| EYVHSSFSGF | HLA-A24:02 | COL10A1 | Breast | 1785 |
| HYDPRTGIF | HLA-A24:02 | COL10A1 | Breast | 1786 |
| IGPPGIPGF | HLA-A24:02 | COL10A1 | Breast | 1787 |
| AYPAIGTPIPF | HLA-A24:02 | COL10A1 | Breast | 1788 |
| KTQFFIPYT | HLA-A30:01 | COL10A1 | Breast | 1789 |
| KTQFFIPYTI | HLA-A30:01 | COL10A1 | Breast | 1790 |
| RYQMPTGIK | HLA-A30:01 | COL10A1 | Breast | 1791 |
| SAFTVILSK | HLA-A30:01 | COL10A1 | Breast | 1792 |
| HVKGTHVWV | HLA-A30:01 | COL10A1 | Breast | 1793 |
| LVHGVFYAER | HLA-A33:03 | COL10A1 | Breast | 1794 |
| YYFSYHVHVK | HLA-A33:03 | COL10A1 | Breast | 1795 |
| YNRQQHYDPR | HLA-A33:03 | COL10A1 | Breast | 1796 |
| TIKSKGIAVR | HLA-A33:03 | COL10A1 | Breast | 1797 |
| IPFDKILYNR | HLA-A33:03 | COL10A1 | Breast | 1798 |
| PFDKILYNR | HLA-A33:03 | COL10A1 | Breast | 1799 |
| YTIKSKGIAVR | HLA-A33:03 | COL10A1 | Breast | 1800 |
| RPSLSGTPL | HLA-B07:02 | COL10A1 | Breast | 1801 |
| MPTGIKGPL | HLA-B07:02 | COL10A1 | Breast | 1802 |
| RPSLSGTPLV | HLA-B07:02 | COL10A1 | Breast | 1803 |
| QRPSLSGTPL | HLA-B07:02 | COL10A1 | Breast | 1804 |
| LPQIPFLLL | HLA-B07:02 | COL10A1 | Breast | 1805 |
| IPFLLLVSL | HLA-B07:02 | COL10A1 | Breast | 1806 |
| LPGPPGPSAV | HLA-B07:02 | COL10A1 | Breast | 1807 |
| FIKAGQRPSL | HLA-B08:01 | COL10A1 | Breast | 1808 |
| TIKSKGIAV | HLA-B08:01 | COL10A1 | Breast | 1809 |
| YTIKSKGIAV | HLA-B08:01 | COL10A1 | Breast | 1810 |
| VILSKAYPA | HLA-B08:01 | COL10A1 | Breast | 1811 |
| IPFLLLVSL | HLA-B08:01 | COL10A1 | Breast | 1812 |
| HVHVKGTHV | HLA-B08:01 | COL10A1 | Breast | 1813 |
| LPNTKTQF | HLA-B08:01 | COL10A1 | Breast | 1814 |
| TQFFIPYTI | HLA-B13:02 | COL10A1 | Breast | 1815 |
| KTQFFIPYTI | HLA-B13:02 | COL10A1 | Breast | 1816 |
| LPQIPFLLLV | HLA-B13:02 | COL10A1 | Breast | 1817 |
| HSSFSGFLV | HLA-B13:02 | COL10A1 | Breast | 1818 |
| PQIPFLLLV | HLA-B13:02 | COL10A1 | Breast | 1819 |
| GIYYFSYHV | HLA-B13:02 | COL10A1 | Breast | 1820 |
| GLYKNGTPV | HLA-B13:02 | COL10A1 | Breast | 1821 |
| YPAIGTPIPE | HLA-B46:01 | COL10A1 | Breast | 1822 |
| FSGFLVAPM | HLA-B46:01 | COL10A1 | Breast | 1823 |
| YVHSSFSGF | HLA-B46:01 | COL10A1 | Breast | 1824 |
| FTVILSKAY | HLA-B46:01 | COL10A1 | Breast | 1825 |
| ILYNRQQHY | HLA-B46:01 | COL10A1 | Breast | 1826 |
| TIKSKGIAV | HLA-B46:01 | COL10A1 | Breast | 1827 |
| SAIDLTEN | HLA-B46:01 | COL10A1 | Breast | 1828 |
| PAIGTPIPF | HLA-B46:01 | COL10A1 | Breast | 1829 |
| MLPQIPFLL | HLA-C01:02 | COL10A1 | Breast | 1830 |
| FSGFLVAPM | HLA-C01:02 | COL10A1 | Breast | 1831 |
| MLPQIPFLLL | HLA-C01:02 | COL10A1 | Breast | 1832 |
| ILSKAYPAI | HLA-C01:02 | COL10A1 | Breast | 1833 |
| VGPAGAKGM | HLA-C01:02 | COL10A1 | Breast | 1834 |
| IPGPPGPSAV | HLA-C01:02 | COL10A1 | Breast | 1835 |
| FIPYTIKSK | HLA-C01:02 | COL10A1 | Breast | 1836 |
| MLPQIPFL | HLA-C01:02 | COL10A1 | Breast | 1837 |
| FSGFLVAPM | HLA-C03:04 | COL10A1 | Breast | 1838 |
| YPAIGTPIPF | HLA-C03:04 | COL10A1 | Breast | 1839 |
| YVHSSFSGR | HLA-C03:04 | COL10A1 | Breast | 1840 |
| SANQGVTGM | HLA-C03:04 | COL10A1 | Breast | 1841 |
| MPVSAFTVI | HLA-C03:04 | COL10A1 | Breast | 1842 |
| FLLLVSLNL | HLA-C03:04 | COL10A1 | Breast | 1843 |
| KGIPGSHGL | HLA-C03:04 | COL10A1 | Breast | 1844 |
| FGKPGLPGL | HLA-C03:04 | COL10A1 | Breast | 1845 |
| VSAFTVIL | HLA-C03:04 | COL10A1 | Breast | 1846 |
| HYDPRTGIF | HLA-C04:01 | COL10A1 | Breast | 1847 |
| MLPQIPFLL | HLA-C04:01 | COL10A1 | Breast | 1848 |
| QHYDPRTGIF | HLA-C04:01 | COL10A1 | Breast | 1849 |
| TYDEYTKGYL | HLA-C04:01 | COL10A1 | Breast | 1850 |
| HYDPRTGI | HLA-C04:01 | COL10A1 | Breast | 1851 |
| KGDVGPAGL | HLA-C04:01 | COL10A1 | Breast | 1852 |
| YYFSYHVHV | HLA-C07:01 | COL10A1 | Breast | 1853 |
| ERYQMPTGI | HLA-C07:01 | COL10A1 | Breast | 1854 |
| LYKNGTPVM | HLA-C07:01 | COL10A1 | Breast | 1855 |
| HYDPRTGIF | HLA-C07:01 | COL10A1 | Breast | 1856 |
| CQIPGIYYF | HLA-C07:01 | COL10A1 | Breast | 1857 |
| SKGLYSSEY | HLA-C07:01 | COL10A1 | Breast | 1858 |
| SSESGFLVA | HLA-C07:01 | COL10A1 | Breast | 1859 |
| IPFDKILY | HLA-C07:01 | COL10A1 | Breast | 1860 |
| YYFSYHVHV | HLA-C07:02 | COL10A1 | Breast | 1861 |
| HYDPRTGIF | HLA-C07:02 | COL10A1 | Breast | 1862 |
| LYKNGTPVM | HLA-C07:02 | COL10A1 | Breast | 1863 |
| VFYAERYQM | HLA-C07:02 | COL10A1 | Breast | 1864 |
| YKNGTPVMY | HLA-C07:02 | COL10A | Breast | 1865 |
| NGTPVMYTY | HLA-C07:02 | COL10A1 | Breast | 1866 |
| FYAERYQM | HLA-C07:02 | COL10A1 | Breast | 1867 |
| QVDWSRLY | HLA-A01:01 | CSAG1 | Melanoma | 1868 |
| VSSLLACLH | HLA-A01:01 | CSAG1 | Melanoma | 1869 |
| ATTVSSLLA | HLA-A01:01 | CSAG1 | Melanoma | 1870 |
| QVDWSRLYR | HLA-A01:01 | CSAG1 | Melanoma | 1871 |
| YRDIGLVKM | HLA-A01:01 | CSAG1 | Melanoma | 1872 |
| RLYRDTGLV | HLA-A02:01 | CSAG1 | Melanoma | 1873 |
| TTACWPAFTV | HLA-A02:01 | CSAG1 | Melanoma | 1874 |
| TVSSLLACL | HLA-A02:01 | CSAG1 | Melanoma | 1875 |
| SLLACLHCPG | HLA-A02:01 | CSAG1 | Melanoma | 1876 |
| MSATTACWPA | HLA-A02:01 | CSAG1 | Melanoma | 1877 |
| SLLACLHCP | HLA-A02:01 | CSAG1 | Melanoma | 1878 |
| HPLIPGPEAL | HLA-A02:01 | CSAG1 | Melanoma | 1879 |
| SRLYRDTGLV | HLA-A02:01 | CSAG1 | Melanoma | 1880 |
| TACWPAFTV | HLA-A02:01 | CSAG1 | Melanoma | 1881 |
| PLIPGPEAL | HLA-A02:01 | CSAG1 | Melanoma | 1882 |
| VLGEARGDQV | HLA-A02:01 | CSAG1 | Melanoma | 1883 |
| PLIPGPEA | HLA-A02:01 | CSAG1 | Melanoma | 1884 |
| ACWPAFTVL | HLA-A02:01 | CSAG1 | Melanoma | 1885 |
| RLYRDTGL | HLA-A02:01 | CSAG1 | Melanoma | 1886 |
| RLYRDTGLVKM | HLA-A02:01 | CSAG1 | Melanoma | 1887 |
| YRDTGLVKM | HLA-A02:01 | CSAG1 | Melanoma | 1888 |
| RLYRDTGLVK | HLA-A03:01 | CSAG1 | Melanoma | 1889 |
| SRLYRDTGLVK | HLA-A03:01 | CSAG1 | Melanoma | 1890 |
| WSRLYRDTGLVK | HLA-A03:01 | CSAG1 | Melanoma | 1891 |
| PLIPGPEALSK | HLA-A03:01 | CSAG1 | Melanoma | 1892 |
| LIPGPEALSK | HLA-A03:01 | CSAG1 | Melanoma | 1893 |
| FSNNHPSTPK | HLA-A11:01 | CSAG1 | Melanoma | 1894 |
| QVDWSRLYR | HLA-A11:01 | CSAG1 | Melanoma | 1895 |
| RLYRDTGLVK | HLA-A11:01 | CSAG1 | Melanoma | 1896 |
| LIPGPEALSK | HLA-A11:01 | CSAG1 | Melanoma | 1897 |
| TTVSSLLAC | HLA-A11:01 | CSAG1 | Melanoma | 1898 |
| CWPAFTVL | HLA-A24:02 | CSAG1 | Melanoma | 1899 |
| CWPAFTVLG | HLA-A24:02 | CSAG1 | Melanoma | 1900 |
| ATTACWPAF | HLA-A24:02 | CSAG1 | Melanoma | 1901 |
| NHPSTPKRF | HLA-A24:02 | CSAG1 | Melanoma | 1902 |
| PLIPGPEAL | HLA-A24:02 | CSAG1 | Melanoma | 1903 |
| ACWPAFTVL | HLA-A24:02 | CSAG1 | Melanoma | 1904 |
| MSRKPRASS | HLA-A30:01 | CSAG1 | Melanoma | 1905 |
| RGRGKHPLI | HLA-A30:01 | CSAG1 | Melanoma | 1906 |
| RLYRDTGLVK | HLA-A30:01 | CSAG1 | Melanoma | 1907 |
| REKGPVKEV | HLA-A30:01 | CSAG1 | Melanoma | 1908 |
| LYRDTGLVK | HLA-A30:01 | CSAG1 | Melanoma | 1909 |
| PVKEVPGTK | HLA-A30:01 | CSAG1 | Melanoma | 1910 |
| HPSTPKRFPR | HLA-A33:03 | CSAG1 | Melanoma | 1911 |
| QVDWSRLYR | HLA-A33:03 | CSAG1 | Melanoma | 1912 |
| LVKMSRKPR | HLA-A33:03 | CSAG1 | Melanoma | 1913 |
| DTGLVKMSR | HLA-A33:03 | CSAG1 | Melanoma | 1914 |
| DQVDWSRLYR | HLA-A33:03 | CSAG1 | Melanoma | 1915 |
| HPLIPGPEAL | HLA-B07:02 | CSAG1 | Melanoma | 1916 |
| KPRASSPF | HLA-B07:02 | CSAG1 | Melanoma | 1917 |
| FPRQPKREKGPV | HLA-B07:02 | CSAG1 | Melanoma | 1918 |
| ACWPAFTVL | HLA-B07:02 | CSAG1 | Melanoma | 1919 |
| TPKRRQRGKHPL | HLA-B08:01 | CSAG1 | Melanoma | 1920 |
| WSRLYRDTGL | HLA-B08:01 | CSAG1 | Melanoma | 1921 |
| SRKPRASSPF | HLA-B08:01 | CSAG1 | Melanoma | 1922 |
| SATTVSSL | HLA-B08:01 | CSAG1 | Melanoma | 1923 |
| HPLIPGPEAL | HLA-B08:01 | CSAG1 | Melanoma | 1924 |
| PLIPGPEAL | HLA-B08:01 | CSAG1 | Melanoma | 1925 |
| TACWPAFTV | HLA-B13:02 | CSAG1 | Melanoma | 1926 |
| TTACWPAFTV | HLA-B13:02 | CSAG1 | Melanoma | 1927 |
| MSATTACWPA | HLA-B13:02 | CSAG1 | Melanoma | 1928 |
| RLYRDTGLV | HLA-B13:02 | CSAG1 | Melanoma | 1929 |
| REKGPVKEV | HLA-B13:02 | CSAG1 | Melanoma | 1930 |
| ACWPAFTV | HLA-B13:02 | CSAG1 | Melanoma | 1931 |
| MSATTVSSL | HLA-B46:01 | CSAG1 | Melanoma | 1932 |
| MSATTVSSLL | HLA-B46:01 | CSAG1 | Melanoma | 1933 |
| FSNNHPSTPKRF | HLA-B46:01 | CSAG1 | Melanoma | 1934 |
| PLIPGPEAL | HLA-B46:01 | CSAG1 | Melanoma | 1935 |
| FSNNHPSTP | HLA-B46:01 | CSAG1 | Melanoma | 1936 |
| PLIPGPEA | HLA-B46:01 | CSAG1 | Melanoma | 1937 |
| MSATTVSSL | HLA-C01:02 | CSAG1 | Melanoma | 1938 |
| SATTVSSLL | HLA-C01:02 | CSAG1 | Melanoma | 1939 |
| TVSSLLACL | HLA-C01:02 | CSAG1 | Melanoma | 1940 |
| LIPGPEAL | HLA-C01:02 | CSAG1 | Melanoma | 1941 |
| CWPAFTVL | HLA-C01:02 | CSAG1 | Melanoma | 1942 |
| SATTVSSL | HLA-C01:02 | CSAG1 | Melanoma | 1943 |
| MSATTVSSL | HLA-C03:04 | CSAG1 | Melanoma | 1944 |
| SATTVSSLL | HLA-C03:04 | CSAG1 | Melanoma | 1945 |
| MSATTVSSLL | HLA-C03:04 | CSAG1 | Melanoma | 1946 |
| ACWPAFTVL | HLA-C03:04 | CSAG1 | Melanoma | 1947 |
| TACWPAFTVL | HLA-C03:04 | CSAG1 | Melanoma | 1948 |
| YRDTGLVKM | HLA-C04:01 | CSAG1 | Melanoma | 1949 |
| LYRDTGLVKM | HLA-C04:01 | CSAG1 | Melanoma | 1950 |
| MSATTVSSL | HLA-C04:01 | CSAG1 | Melanoma | 1951 |
| CWPAFTVL | HLA-C04:01 | CSAG1 | Melanoma | 1952 |
| LIPGPEAL | HLA-C04:01 | CSAG1 | Melanoma | 1953 |
| YRDTGLVKM | HLA-C07:01 | CSAG1 | Melanoma | 1954 |
| SRLYRDTGL | HLA-C07:01 | CSAG1 | Melanoma | 1955 |
| MSATTVSSL | HLA-C07:01 | CSAG1 | Melanoma | 1956 |
| RRGRGKHPL | HLA-C07:01 | CSAG1 | Melanoma | 1957 |
| TVLGEARGD | HLA-C07:01 | CSAG1 | Melanoma | 1958 |
| YRDTGLVKM | HLA-C07:02 | CSAG1 | Melanoma | 1959 |
| SRLYRDTGL | HLA-C07:02 | CSAG1 | Melanoma | 1960 |
| LYRDTGLVKM | HLA-C07:02 | CSAG1 | Melanoma | 1961 |
| ACWPAFTVL | HLA-C07:02 | CSAG1 | Melanoma | 1962 |
| SRKPRASSP | HLA-C07:02 | CSAG1 | Melanoma | 1963 |
| CSAVFHERY | HLA-A01:01 | CTCFL | Cervical; Ovarian | 1964 |
| YSAAELKCRY | HLA-A01:01 | CTCFL | Cervical; Ovarian | 1965 |
| YCSAVFHERY | HLA-A01:01 | CTCFL | Cervical; Ovarian | 1966 |
| AISIQQELY | HLA-A01:01 | CTCFL | Cervical; Ovarian | 1967 |
| RSDEIVLTV | HLA-A01:01 | CTCFL | Cervical; Ovarian | 1968 |
| PSEESEKY | HLA-A01:01 | CTCFL | Cervical; Ovarian | 1969 |
| ITDARHHAW | HLA-A01:01 | CTCFL | Cervical; Ovarian | 1970 |
| KSDLRFLGL | HLA-A01:01 | CTCFL | Cervical; Ovarian | 1971 |
| FLVEMGFYHV | HLA-A02:01 | CTCFL | Cervical; Ovarian | 1972 |
| MMLVSAWLL | HLA-A02:01 | CTCFL | Cervical; Ovarian | 1973 |
| FLDLKLHGI | HLA-A02:01 | CTCFI | Cervical; Ovarian | 1974 |
| ILWVGNSEV | HLA-A02:01 | CTCFL | Cervical; Ovarian | 1975 |
| ILVEAAVQV | HLA-A02:01 | CTCFL | Cervical; Ovarian | 1976 |
| LFLVEMGFYHV | HLA-A02:01 | CTCFL | Cervical; Ovarian | 1977 |
| LLFIGTIKV | HLA-A02:01 | CTCFL | Cervical; Ovarian | 1978 |
| RMMLVSAWL | HLA-A02:01 | CTCFL | Cervical; Ovarian | 1979 |
| LLFLVEMGFYHV | HLA-A02:01 | CTCFL | Cervical; Ovarian | 1980 |
| RMMLVSAWLL | HLA-A02:01 | CTCFL | Cervical; Ovarian | 1981 |
| GLIPTVLTL | HLA-A02:01 | CTCFL | Cervical; Ovarian | 1982 |
| KLHGILVEA | HLA-A02:01 | CTCFL | Cervical; Ovarian | 1983 |
| FLVEMGFYHVS | HLA-A02:01 | CTCFL | Cervical; Ovarian | 1984 |
| WILWVGNSEV | HLA-A02:01 | CTCFL | Cervical; Ovarian | 1985 |
| KLLFIGTIKV | HLA-A02:01 | CTCFL | Cervical; Ovarian | 1986 |
| SLAETTGLIKL | HLA-A02:01 | CTCFL | Cervical; Ovarian | 1987 |
| VLEEEVELV | HLA-A02:01 | CTCFL | Cervical; Ovarian | 1988 |
| SVLEBEVEL | HLA-A02:01 | CTCFL | Cervical; Ovarian | 1989 |
| WLIVLLFLV | HLA-A02:01 | CTCFL | Cervical; Ovarian | 1990 |
| SVLEEEVELV | HLA-A02:01 | CTCFL | Cervical; Ovarian | 1991 |
| ILQKHGENV | HLA-A02:01 | CTCFL | Cervical; Ovarian | 1992 |
| RMSSFNRHMK | HLA-A03:01 | CTCFL | Cervical; Ovarian | 1993 |
| KQAFYYSYK | HLA-A03:01 | CTCFL | Cervical; Ovarian | 1994 |
| GTMKIHILQK | HLA-A03:01 | CTCFL | Cervical; Ovarian | 1995 |
| VTNSRICYK | HLA-A03:01 | CTCFL | Cervical; Ovarian | 1996 |
| RICYKQAFYY | HLA-A03:01 | CTCFL | Cervical; Ovarian | 1997 |
| GLIPTVLTLK | HLA-A03:01 | CTCFL | Cervical; Ovarian | 1998 |
| ANFIPTVYK | HLA-A03:01 | CTCFL | Cervical; Ovarian | 1999 |
| SLAETTGLIK | HLA-A03:01 | CTCFL | Cervical; Ovarian | 2000 |
| KLLFIGTIK | HLA-A03:01 | CTCFL | Cervical; Ovarian | 2001 |
| SLLQGPLCR | HLA-A03:01 | CTCFL | Cervical; Ovarian | 2002 |
| GTMKIHILQK | HLA-A11:01 | CTCFL | Cervical; Ovarian | 2003 |
| VTNSRICYK | HLA-A11:01 | CTCFL | Cervical; Ovarian | 2004 |
| SVTNSRICYK | HLA-A11:01 | CTCFL | Cervical; Ovarian | 2005 |
| KQAFYYSYK | HLA-A11:01 | CTCFL | Cervical; Ovarian | 2006 |
| SVLSEQFTK | HLA-A11:01 | CTCFL | Cervical; Ovarian | 2007 |
| ANFIPTVYK | HLA-A11:01 | CTCFL | Cervical; Ovarian | 2008 |
| KYILTLQTV | HLA-A24:02 | CTCFL | Cervical; Ovarian | 2009 |
| KYASVEVKPF | HLA-A24:02 | CTCFL | Cervical; Ovarian | 2010 |
| KYILTLQTVHP | HLA-A24:02 | CTCFL | Cervical: Ovarian | 2011 |
| KYQCPHCATI | HLA-A24:02 | CTCFL | Cervical; Ovarian | 2012 |
| KWSGLKPQTF | HLA-A24:02 | CTCFL | Cervical; Ovarian | 2013 |
| IYAGNNMHSL | HLA-A24:02 | CTCFL | Cervical; Ovarian | 2014 |
| LYSPQEMEVLQF | HLA-A24:02 | CTCFL | Cervical; Ovarian | 2015 |
| IYAGNNMHSLL | HLA-A24:02 | CTCFL | Cervical; Ovarian | 2016 |
| RVHMRNLHA | HLA-A30:01 | CTCFL | Cervical; Ovarian | 2017 |
| RTKEQLFFV | HLA-A30:01 | CTCFL | Cervical; Ovarian | 2018 |
| RTHSEATSK | HLA-A30:01 | CTCFL | Cervical; Ovarian | 2019 |
| KQAFYYSYK | HLA-A30:01 | CTCFL | Cervical; Ovarian | 2020 |
| HMKTHTSEK | HLA-A30:01 | CTCFL | Cervical; Ovarian | 2021 |
| STKNQRKTK | HLA-A30:01 | CTCFL | Cervical; Ovarian | 2022 |
| TMKIHILQK | HLA-A30:01 | CTCFL | Cervical; Ovarian | 2023 |
| RFKCKHCSY | HLA-A30:01 | CTCFL | Cervical; Ovarian | 2024 |
| FSRWINLHR | HLA-A33:03 | CTCFL | Cervical; Ovarian | 2025 |
| TFRTVTLLR | HLA-A33:03 | CTCFL | Cervical; Ovarian | 2026 |
| DVCMFTSSR | HLA-A33:03 | CTCFL | Cervical; Ovarian | 2027 |
| SSRMSSFNR | HLA-A33:03 | CTCFL | Cervical; Ovarian | 2028 |
| MFTSSRMSSFNR | HLA-A33:03 | CTCFL | Cervical; Ovarian | 2029 |
| ETYNQGRRR | HLA-A33:03 | CTCFL | Cervical: Ovarian | 2030 |
| DCLQMLQVWQR | HLA-A33:03 | CTCFL | Cervical; Ovarian | 2031 |
| TYNQGRRRR | HLA-A33:03 | CTCFL | Cervical; Ovarian | 2032 |
| EKNQLLAER | HLA-A33:03 | CTCFL | Cervical; Ovarian | 2033 |
| KPHLCHLCL | HLA-B07:02 | CTCFL | Cervical; Ovarian | 2034 |
| HPKAGLGPEDPL | HLA-B07:02 | CTCFL | Cervical; Ovarian | 2035 |
| RPYKCNDCNM | HLA-B07:02 | CTCFL | Cervical; Ovarian | 2036 |
| RPYKCNDCNMAF | HLA-B07:02 | CTCFL | Cervical; Ovarian | 2037 |
| IPRCKFHPDCL | HLA-B07:02 | CTCFL | Cervical; Ovarian | 2038 |
| QPGPGLLWL | HLA-B07:02 | CTCFL | Cervical; Ovarian | 2039 |
| SPQEMEVL | HLA-B07:02 | CTCFL | Cervical; Ovarian | 2040 |
| GPGSGPLL | HLA-B07:02 | CTCFL | Cervical; Ovarian | 2041 |
| GPGSGPLLRL | HLA-B07:02 | CTCFL | Cervical; Ovarian | 2042 |
| MLQVWQRLFPL | HLA-B08:01 | CTCFL | Cervical; Ovarian | 2043 |
| CLKTFRTVTL | HLA-B08:01 | CTCFL | Cervical; Ovarian | 2044 |
| QVWQRLFPL | HLA-B08:01 | CTCFL | Cervical; Ovarian | 2045 |
| ELKCRYCSA | HLA-B08:01 | CTCFL | Cervical; Ovarian | 2046 |
| IPRCKFHPDCL | HLA-B08:01 | CTCFL | Cervical; Ovarian | 2047 |
| CSMCKYASV | HLA-B08:01 | CTCFL | Cervical; Ovarian | 2048 |
| EATSKRSL | HLA-B08:01 | CTCFL | Cervical; Ovarian | 2049 |
| EQFTKIKEL | HLA-B08:01 | CTCFL | Cervical; Ovarian | 2050 |
| DSKLAVSL | HLA-B08:01 | CTCFL | Cervical; Ovarian | 2051 |
| THARKSDL | HLA-B08:01 | CTCFL | Cervical; Ovarian | 2052 |
| DLKLHGIL | HLA-B08:01 | CTCFL | Cervical; Ovarian | 2053 |
| HDANFIPTV | HLA-B13:02 | CTCFL | Cervical; Ovarian | 2054 |
| LQQCVAISI | HLA-B13:02 | CTCFL | Cervical; Ovarian | 2055 |
| KQAFYYSYKI | HLA-B13:02 | CTCFL | Cervical; Ovarian | 2056 |
| QAFYYSYKI | HLA-B13:02 | CTCFL | Cervical; Ovarian | 2057 |
| YHDANFIPTV | HLA-B13:02 | CTCFL | Cervical; Ovarian | 2058 |
| YQCPHCATI | HLA-B13:02 | CTCFL | Cervical; Ovarian | 2059 |
| QQQEGVQVV | HLA-B13:02 | CTCFL | Cervical; Ovarian | 2060 |
| GLIPTVLTL | HLA-B13:02 | CTCFL | Cervical; Ovarian | 2061 |
| RSDEIVLTV | HLA-B13:02 | CTCFL | Cervical; Ovarian | 2062 |
| GFSRWILWV | HLA-B13:02 | CTCFL | Cervical; Ovarian | 2063 |
| FTSSRMSSF | HLA-B46:01 | CTCFL | Cervical; Ovarian | 2064 |
| YASVEVKPF | HLA-B46:01 | CTCFL | Cervical; Ovarian | 2065 |
| YAGNNMHSL | HLA-B46:01 | CTCFL | Cervical; Ovarian | 2066 |
| MAATEISVL | HLA-B46:01 | CTCFL | Cervical; Ovarian | 2067 |
| HDANFIPTVY | HLA-B46:01 | CTCFL | Cervical; Ovarian | 2068 |
| VAISIQQEL | HLA-B46:01 | CTCFL. | Cervical; Ovarian | 2069 |
| KCNDCNMAF | HLA-B46:01 | CTCFL | Cervical; Ovarian | 2070 |
| FSRWITSKW | HLA-B46:01 | CTCFL | Cervical; Ovarian | 2071 |
| RFKCKHCSY | HLA-B46:01 | CTCFL | Cervical; Ovarian | 2072 |
| DANFIPTVY | HLA-B46:01 | CTCFL | Cervical: Ovarian | 2073 |
| FTSSRMSSF | HLA-C01:02 | CTCFL | Cervical; Ovarian | 2074 |
| YAGNNMHSL | HLA-C01:02 | CTCFL | Cervical; Ovarian | 2075 |
| YSPQEMEVL | HLA-C01:02 | CTCFL | Cervical; Ovarian | 2076 |
| MAATEISVL | HLA-C01:02 | CTCFL | Cervical; Ovarian | 2077 |
| SAHRNLCLL | HLA-C01:02 | CTCFL | Cervical; Ovarian | 2078 |
| FTQSGTMKI | HLA-C01:02 | CTCFL | Cervical; Ovarian | 2079 |
| LIPTVLTL | HLA-C01:02 | CTCFL | Cervical; Ovarian | 2080 |
| FHPDCLQML | HLA-C01:02 | CTCFL | Cervical; Ovarian | 2081 |
| GGPGSGPLL | HLA-C01:02 | CTCFL | Cervical; Ovarian | 2082 |
| MAATEISVL | HLA-C03:04 | CTCFL | Cervical; Ovarian | 2083 |
| YAGNNMHSL | HLA-C03:04 | CTCFL | Cervical; Ovarian | 2084 |
| VAISIQQEL | HLA-C03:04 | CTCFL | Cervical; Ovarian | 2085 |
| YASVEASKL | HLA-C03:04 | ICTCFL | Cervical; Ovarian | 2086 |
| YASVEVKPF | HLA-C03:04 | CTCFL | Cervical; Ovarian | 2087 |
| FTSEAVEL | HLA-C03:04 | CTCFL | Cervical; Ovarian | 2088 |
| AATEISVL | HLA-C03:04 | CTCFL | Cervical; Ovarian | 2089 |
| HAYSAAEL | HLA-C03:04 | CTCFL | Cervical; Ovarian | 2090 |
| YHDANFIPTVY | HLA-C04:01 | CTCFL | Cervical; Ovarian | 2091 |
| YHDANFIPTV | HLA-C04:01 | CTCFL | Cervical; Ovarian | 2092 |
| HHAWLIVLL | HLA-C04:01 | CTCFL | Cervical; Ovarian | 2093 |
| VQQPGPGLL | HLA-C04:01 | CTCFL | Cervical; Ovarian | 2094 |
| LHAYSAAEL | HLA-C04:01 | CTCFL | Cervical; Ovarian | 2095 |
| HFTSEAVEL | HLA-C04:01 | CTCFL | Cervical; Ovarian | 2096 |
| VLEEEVEL | HLA-C04:01 | CTCFL | Cervical: Ovarian | 2097 |
| FTSEAVEL | HLA-C04:01 | CTCFL | Cervical; Ovarian | 2098 |
| TFRTVILL | HLA-C04:01 | CTCFL | Cervical; Ovarian | 2099 |
| HAWLIVLL | HLA-C04:01 | CTCFL | Cervical; Ovarian | 2100 |
| TRFTQSGTM | HLA-C07:01 | CTCFL | Cervical; Ovarian | 2101 |
| FRKYHDANF | HLA-C07:01 | CTCFL | Cervical; Ovarian | 2102 |
| MRTHSGVHM | HLA-C07:01 | CTCFL | Cervical; Ovarian | 2103 |
| SRICYKQAR | HLA-C07:01 | CTCFL | Cervical; Ovarian | 2104 |
| FRKYHDANFI | HLA-C07:01 | CTCFL | Cervical; Ovarian | 2105 |
| CRYCSAVF | HLA-C07:01 | CTCFL | Cervical; Ovarian | 2106 |
| RRGSRRVTW | HLA-C07:01 | CTCFL | Cervical; Ovarian | 2107 |
| ERSDEIVL | HLA-C07:01 | CTCFL | Cervical; Ovarian | 2108 |
| HRSPSELEA | HLA-C07:01 | CTCFL | Cervical; Ovarian | 2109 |
| FRKYHDANF | HLA-C07:02 | CTCFL | Cervical; Ovarian | 2110 |
| SRICYKQAF | HLA-C07:02 | CTCFL | Cervical; Ovarian | 2111 |
| FHPDCLQML | HLA-C07:02 | CTCFL | Cervical; Ovarian | 2112 |
| FYYSYKIYA | HLA-C07:02 | CTCFL | Cervical; Ovarian | 2113 |
| VHMRNLHAY | HLA-C07:02 | CTCFL | Cervical; Ovarian | 2114 |
| HHAWLIVLL | HLA-C07:02 | CTCFL | Cervical; Ovarian | 2115 |
| YKQAFYYSY | HLA-C07:02 | CTCFL | Cervical; Ovarian | 2116 |
| ARHHAWLIVL | HLA-C07:02 | CTCFL | Cervical; Ovarian | 2117 |
| FYYSYKIY | HLA-C07:02 | CTCFL | Cervical; Ovarian | 2118 |
| MRTHSGVHM | HLA-C07:02 | CTCFL | Cervical; Ovarian | 2119 |
| HSWPWQISLQY | HLA-A01:01 | CTRC | Pancreas | 2120 |
| YIDWINEKM | HLA-A01:01 | CTRC | Pancreas | 2121 |
| RIDWWGFRV | HLA-A01:01 | CTRC | Pancreas | 2122 |
| LSDTIQVAC | HLA-A01:01 | CTRC | Pancreas | 2123 |
| LLPKDYPCYV | HLA-A02:01 | CTRC | Pancreas | 2124 |
| KLQQGLQPV | HLA-A02:01 | CTRC | Pancreas | 2125 |
| SLLPKDYPCYV | HLA-A02:01 | CTRC | Pancreas | 2126 |
| TLIASNFVL | HLA-A02:01 | CTRC | Pancreas | 2127 |
| MLGITVLAAL | HLA-A02:01 | CTRC | Pancreas | 2128 |
| CQLENGSWEV | HLA-A02:01 | CTRC | Pancreas | 2129 |
| ALIKLAEHV | HLA-A02:01 | CTRC | Pancreas | 2130 |
| LLLRNDIAL | HLA-A02:01 | CTRC | Pancreas | 2131 |
| DSLLPKDYPCYV | HLA-A02:01 | CTRC | Pancreas | 2132 |
| KLAEHVEL | HLA-A02:01 | CTRC | Pancreas | 2133 |
| SLFVGVDTIHV | HLA-A02:01 | CTRC | Pancreas | 2134 |
| GLQPVVDHA | HLA-A02:01 | CTRC | Pancreas | 2135 |
| SLFVGVDTI | HLA-A02:01 | CTRC | Pancreas | 2136 |
| KLAEHVELS | HLA-A02:01 | CTRC | Pancreas | 2137 |
| RTYRVAVGK | HLA-A03:01 | CTRC | Pancreas | 2138 |
| LLRNDIALIK | HLA-A03:01 | CTRC | Pancreas | 2139 |
| TRTYRVAVGK | HLA-A03:01 | CTRC | Pancreas | 2140 |
| RLWINGPIADK | HLA-A03:01 | CTRC | Pancreas | 2141 |
| VVYTRVSAY | HLA-A03:01 | CTRC | Pancreas | 2142 |
| RTYRVAVGK | HLA-A11:01 | CTRC | Pancreas | 2143 |
| GVDTIHVHK | HLA-A11:01 | CTRC | Pancreas | 2144 |
| TTWRWKTKK | HLA-A11:01 | CTRC | Pancreas | 2145 |
| SAYIDWINEK | HLA-A11:01 | CTRC | Pancreas | 2146 |
| AYIDWINEK | HLA-A11:01 | CTRC | Pancreas | 2147 |
| SRIDWWGFRVK | HLA-A11:01 | CTRC | Pancreas | 2148 |
| VYTRVSAYI | HLA-A24:02 | CTRC | Pancreas | 2149 |
| CYVTGWGRLW | HLA-A24:02 | CTRC | Pancreas | 2150 |
| KDYPCYVTGW | HLA-A24:02 | CTRC | Pancreas | 2151 |
| AYIDWINEK | HLA-A24:02 | CTRC | Pancreas | 2152 |
| VWPWERTTW | HLA-A24:02 | CTRC | Pancreas | 1215 |
| RVKKTMVCA | HLA-A30:01 | CTRC | Pancreas | 2154 |
| RTYRVAVGK | HLA-A30:01 | CTRC | Pancreas | 2155 |
| RTTWRWKTK | HLA-A30:01 | CTRC | Pancreas | 2156 |
| AYIDWINEK | HLA-A30:01 | CTRC | Pancreas | 2157 |
| CISNTRTYR | HLA-A33:03 | CTRC | Pancreas | 2158 |
| CSRIDWWGFR | HLA-A33:03 | CTRC | Pancreas | 2159 |
| HCISNTRTYR | HLA-A33:03 | CTRC | Pancreas | 2160 |
| EVFGIVSFGSR | HLA-A33:03 | CTRC | Pancreas | 2161 |
| WVWTPSTSTR | HLA-A33:03 | CTRC | Pancreas | 2162 |
| DYPCYVTGWGR | HLA-A33:03 | CTRC | Pancreas | 2163 |
| MPSCCAMIL | HLA-B07:02 | CTRC | Pancreas | 2164 |
| LPSSSLQSM | HLA-B07:02 | CTRC | Pancreas | 2165 |
| RPHSWPWQISL | HLA-B07:02 | CTRC | Pancreas | 2166 |
| RPHSWPWQI | HLA-B07:02 | CTRC | Pancreas | 2167 |
| HVHKRWNAL | HLA-B08:01 | CTRC | Pancreas | 2168 |
| IHVHKRWNAL | HLA-B08:01 | CTRC | Pancreas | 2169 |
| HVHKRWNALL | HLA-B08:01 | CTRC | Pancreas | 2170 |
| WINEKMQL | HLA-B08:01 | CTRC | Pancreas | 2171 |
| CLPEKDSL | HLA-B08:01 | CTRC | Pancreas | 2172 |
| AEHVELSDTI | HLA-B13:02 | CTRC | Pancreas | 2173 |
| CQLENGSWEV | HLA-B13:02 | CTRC | Pancreas | 2174 |
| VELSDTIQV | HLA-B13:02 | CTRC | Pancreas | 2175 |
| RIDWWGFRV | HLA-B13:02 | CTRC | Pancreas | 2176 |
| SLFVGVDTI | HLA-B13:02 | CTRC | Pancreas | 2177 |
| RPHSWPWQI | HLA-B13:02 | CTRC | Pancreas | 2178 |
| VVYTRVSAY | HLA-B46:01 | CTRC | Pancreas | 2179 |
| ASSCGVPSF | HLA-B46:01 | CTRC | Pancreas | 2180 |
| HSWPWQISL | HLA-B46:01 | CTRC | Pancreas | 2181 |
| CSRIDWWGF | HLA-B46:01 | CTRC | Pancreas | 2182 |
| HCISNTRTY | HLA-B46:01 | CTRC | Pancreas | 2183 |
| HSWPWQISL | HLA-C01:02 | CTRC | Pancreas | 2184 |
| AMILPSSSL | HLA-C01:02 | CTRC | Pancreas | 2185 |
| YIDWINEKM | HLA-C01:02 | CTRC | Pancreas | 2186 |
| ILPSSSLQSM | HLA-C01:02 | CTRC | Pancreas | 2187 |
| CLPEKDSLL | HLA-C01:02 | CTRC | Pancreas | 2188 |
| CLPEKDSL | HLA-C01:02 | CTRC | Pancreas | 2189 |
| HSWPWQISL | HLA-C03:04 | CTRC | Pancreas | 2190 |
| LGITVLAAL | HLA-C03:04 | CTRC | Pancreas | 2191 |
| AMILPSSSL | HLA-C03:04 | CTRC | Pancreas | 2192 |
| CATPGPTVW | HLA-C03:04 | CTRC | Pancreas | 2193 |
| MILPSSSL | HLA-C03:04 | CTRC | Pancreas | 2194 |
| YIDWINEKM | HLA-C04:01 | CTRC | Pancreas | 2195 |
| MPSCCAMIL | HLA-C04:01 | CTRC | Pancreas | 2196 |
| RHTCGGTLI | HLA-C04:01 | CTRC | Pancreas | 2197 |
| SWEVFGIVSF | HLA-C04:01 | CTRC | Pancreas | 2198 |
| VEDEEGSLP | HLA-C04:01 | CTRC | Pancreas | 2199 |
| VEDEEGSL | HLA-C04:01 | CTRC | Pancreas | 2200 |
| WRHTCGGTL | HLA-C07:01 | CTRC | Pancreas | 2201 |
| HKRWNALLL | HLA-C07:01 | CTRC | Pancreas | 2202 |
| WRHTCGGTLI | HLA-C07:01 | CTRC | Pancreas | 2203 |
| HSWPWQISL | HLA-C07:01 | CTRC | Pancreas | 2204 |
| TRKKPVVY | HLA-C07:01 | CTRC | Pancreas | 2205 |
| TRKKPVVYT | HLA-C07:01 | CTRC | Pancreas | 2206 |
| WRHTQGGTL | HLA-C07:02 | CTRC | Pancreas | 2207 |
| HKRWNALLL | HLA-C07:02 | CTRC | Pancreas | 2208 |
| VHKRWNALL | HLA-C07:02 | CTRC | Pancreas | 2209 |
| TRKKPVVY | HLA-C07:02 | CTRC | Pancreas | 2210 |
| ARPHSWPWQI | HLA-C07:02 | CTRC | Pancreas | 2211 |
| KADIYTQNFY | HLA-A01:01 | CYP11A1 | Adrenal Gland | 2212 |
| TSMTLQWHLY | HLA-A01:01 | CYP11A1 | Adrenal Gland | 2213 |
| TTSMTLQWHLY | HLA-A01:01 | CYP11A1 | Adrenal Gland | 2214 |
| HHDYRGILY | HLA-A01:01 | CYP11A1 | Adrenal Gland | 2215 |
| YMIPAKTLV | HLA-A02:01 | CYP11A1 | Adrenal Gland | 2216 |
| FAFESITNV | HLA-A02:01 | CYP11A1 | Adrenal Gland | 2217 |
| TMLQLVPLL | HLA-A02:01 | CYP11A1 | Adrenal Gland | 2218 |
| FLINMLENFRV | HLA-A02:01 | CYP11A1 | Adrenal Gland | 2219 |
| YMIPAKTLVQV | HLA-A02:01 | CYP11A1 | Adrenal Gland | 2220 |
| MLAKGLPPRSV | HLA-A02:01 | CYP11A1 | Adrenal Gland | 2221 |
| VLRDYMIPA | HLA-A02:01 | CYP11A1 | Adrenal Gland | 2222 |
| YQMFHTSVPM | HLA-A02:01 | CYP11A1 | Adrenal Gland | 2223 |
| KLGNVESVYV | HLA-A02:01 | CYP11A1 | Adrenal Gland | 2224 |
| RLHPISVTL | HLA-A02:01 | CYP11A1 | Adrenal Gland | 2225 |
| GLPPRSVLV | HLA-A02:01 | CYP11A1 | Adrenal Gland | 2226 |
| NLPPDLFRL | HLA-A02:01 | CYP11A1 | Adrenal Gland | 2227 |
| FLIPPWVAY | HLA-A02:01 | CYP11A1 | Adrenal Gland | 2228 |
| RLFRTKTWK | HLA-A03:01 | CYP11A1 | Adrenal Gland | 2229 |
| MLQLVPLLK | HLA-A03:01 | CYP11A1 | Adrenal Gland | 2230 |
| ILYRLLGDSK | HLA-A03:01 | CYP11A1 | Adrenal Gland | 2231 |
| FLIPPWVAY | HLA-A03:01 | CYP11A1 | Adrenal Gland | 2232 |
| GLPPRSVLVK | HLA-A03:01 | CYP11A1 | Adrenal Gland | 2233 |
| AAWDVIFSK | HLA-A11:01 | CYP11A1 | Adrenal Gland | 2234 |
| ATMLQLVPLLK | HLA-A11:01 | CYP11A1 | Adrenal Gland | 2235 |
| SVLHRRIKK | HLA-A11:01 | CYP11A1 | Adrenal Gland | 2236 |
| MLQLVPLLK | HLA-A11:01 | CYP11A1 | Adrenal Gland | 2237 |
| HVAAWDVIFSK | HLA-A11:01 | CYP11A1 | Adrenal Gland | 2238 |
| RFIDAIYQMF | HLA-A24:02 | CYP11A1 | Adrenal Gland | 2239 |
| IYTQNFYWEL | HLA-A24:02 | CYP11A1 | Adrenal Gland | 2240 |
| GWLNLYHFW | HLA-A24:02 | CYP11A1 | Adrenal Gland | 2241 |
| IYALGREPTF | HLA-A24:02 | CYP11A1 | Adrenal Gland | 2242 |
| TFFFDPENF | HLA-A24:02 | CYP11A1 | Adrenal Gland | 2243 |
| ATKNFLPLL | HLA-A30:01 | CYP11A1 | Adrenal Gland | 2244 |
| STRSPRPFN | HLA-A30:01 | CYP11A1 | Adrenal Gland | 2245 |
| RLFRTKTWK | HLA-A30:01 | CYP11A1 | Adrenal Gland | 2246 |
| KYGPIYREK | HLA-A30:01 | CYP11A1 | Adrenal Gland | 2247 |
| NFYWELRQK | HLA-A30:01 | CYP11A1 | Adrenal Gland | 2248 |
| AAWDVIPSK | HLA-A30:01 | CYP11A1 | Adrenal Gland | 2249 |
| DFVSVLHRR | HLA-A33:03 | CYP11A1 | Adrenal Gland | 2250 |
| YTQNFYWELR | HLA-A33:03 | CYP11A1 | Adrenal Gland | 2251 |
| VAYHQYYQR | HLA-A33:03 | CYP11A1 | Adrenal Gland | 2252 |
| EVVNPEAQR | HLA-A33:03 | CYP11A1 | Adrenal Gland | 2253 |
| ESITNVIFGER | HLA-A33:03 | CYP11A1 | Adrenal Gland | 2254 |
| APREGLGRL | HLA-B07:02 | CYP11A1 | Adrenal Gland | 2255 |
| SAPREGLGRL | HLA-B07:02 | CYP11A1 | Adrenal Gland | 2256 |
| VPMLNLPPDL | HLA-B07:02 | CYP11A1 | Adrenal Gland | 2257 |
| SPQDNGWLNL | HLA-B07:02 | CYP11A1 | Adrenal Gland | 2258 |
| IPSPGDNGWL | HLA-B07:02 | CYP11A1 | Adrenal Gland | 2259 |
| TLRLHPISV | HLA-B08:01 | CYP11A1 | Adrenal Gland | 2260 |
| MATMLQLVPL | HLA-B08:01 | CYP11A1 | Adrenal Gland | 2261 |
| TLQWHLYEM | HLA-B08:01 | CYP11A1 | Adrenal Gland | 2262 |
| TIFLINML | HLA-B08:01 | CYP11A1 | Adrenal Gland | 2263 |
| YMIPAKTL | HLA-B08:01 | CYP11A1 | Adrenal Gland | 2264 |
| AWKKDRVAL | HLA-B08:01 | CYP11A1 | Adrenal Gland | 2265 |
| AELEMTIFLI | HLA-B13:02 | CYP11A1 | Adrenal Gland | 2266 |
| LEMTIFLI | HLA-B13:02 | CYP11A1 | Adrenal Gland | 2267 |
| RNLGFGWGV | HLA-B13:02 | CYP11A1 | Adrenal Gland | 2268 |
| RLHPISVTL | HLA-B13:02 | CYP11A1 | Adrenal Gland | 2269 |
| RQGMLEEVV | HLA-B13:02 | CYP11A1 | Adrenal Gland | 2270 |
| AQGDMATML | HLA-B13:02 | CYP11A1 | Adrenal Gland | 2271 |
| FAFESITNV | HLA-B46:01 | CYP11A1 | Adrenal Gland | 2272 |
| YQMFHTSVPM | HLA-B46:01 | CYP11A1 | Adrenal Gland | 2273 |
| FLIPPWVAY | HLA-B46:01 | CYP11A1 | Adrenal Gland | 2274 |
| LSKDKNITY | HLA-B46:01 | CYP11A1 | Adrenal Gland | 2275 |
| RLHPISVTL | HLA-B46:01 | CYP11A1 | Adrenal Gland | 2276 |
| RLHPISVTL | HLA-C01:02 | CYP11A1 | Adrenal Gland | 2277 |
| LMPEKPISF | HLA-C01:02 | CYP11A1 | Adrenal Gland | 2278 |
| YTQNFYWEL | HLA-C01:02 | CYP11A1 | Adrenal Gland | 2279 |
| MAPEATKNFL | HLA-C01:02 | CYP11A1 | Adrenal Gland | 2280 |
| MAPEATKNF | HLA-C01:02 | CYP11A1 | Adrenal Gland | 2281 |
| RSPRPFNEI | HLA-C01:02 | CYP11A1 | Adrenal Gland | 2282 |
| FAFESITNV | HLA-C03:04 | CYP11A1 | Adrenal Gland | 2283 |
| YALGREPTF | HLA-C03:04 | CYP11A1 | Adrenal Gland | 2284 |
| FAFESITNVI | HLA-C03:04 | CYP11A1 | Adrenal Gland | 2285 |
| YTQNFYWEL | HLA-C03:04 | CYP11A1 | Adrenal Gland | 2286 |
| YVIDPEDVAL | HLA-C03:04 | CYP11A1 | Adrenal Gland | 2287 |
| YYQRPIGVL | HLA-C04:01 | CYP11A1 | Adrenal Gland | 2288 |
| FIDATYQMF | HLA-C04:01 | CYP11A1 | Adrenal Gland | 2289 |
| HHDYRGILY | HLA-C04:01 | CYP11A1 | Adrenal Gland | 2290 |
| NFDPTRWL | HLA-C04:01 | CYP11A1 | Adrenal Gland | 2291 |
| FFDPENFD | HLA-C04:01 | CYP11A1 | Adrenal Gland | 2292 |
| HWCKWPSMI | HLA-C04:01 | CYP11A1 | Adrenal Gland | 2293 |
| YRGILYRLL | HLA-C07:01 | CYP11A1 | Adrenal Gland | 2294 |
| YRLLGDSKM | HLA-C07:01 | CYP11A1 | Adrenal Gland | 2295 |
| YYQRPIGVL | HLA-C07:01 | CYP11A1 | Adrenal Gland | 2296 |
| SRDFVSVL | HLA-C07:01 | CYP11A1 | Adrenal Gland | 2297 |
| VSRDFVSVL | HLA-C07:01 | CYP11A1 | Adrenal Gland | 2298 |
| YYQRPIGVL | HLA-C07:02 | CYP11A1 | Adrenal Gland | 2299 |
| YRGILYRLL | HLA-C07:02 | CYP11A1 | Adrenal Gland | 2300 |
| RFIDAIYQM | HLA-C07:02 | CYP11A1 | Adrenal Gland | 2301 |
| FRVEIQHL | HLA-C07:02 | CYP11A1 | Adrenal Gland | 2302 |
| SSDLVLQNY | HLA-A01:01 | CYP11B2; | Adrenal Gland | 2303 |
| | | CYP11B1 | | |
| SMDAPTSRLY | HLA-A01:01 | CYP11B1 | Adrenal Gland | 2304 |
| LTQEDIKMVY | HLA-A01:01 | CYP11B2; | Adrenal Gland | 2305 |
| | | CYP11B1 | | |
| ASSDLVLQNY | HLA-A01:01 | CYP11B1 | Adrenal Gland | 2306 |
| TLDVQPSIFHY | HLA-A01:01 | CYP11B2; | Adrenal Gland | 2307 |
| | | CYP11B1 | | |
| WLDIRGSGRNFY | HLA-A01:01 | CYP11B1 | Adrenal Gland | 2308 |
| FILRPSMFPL | HLA-A02:01 | CYP11B1 | Adrenal Gland | 2309 |
| FPLLMTLFEL | HLA-A02:01 | CYP11B2; | Adrenal Gland | 2310 |
| | | CYP11B1 | | |
| RLAEAEMLL | HLA-A02:01 | CYP11B2; | Adrenal Gland | 2311 |
| | | CYP11B1 | | |
| RLYPVGLFL | HLA-A02:01 | CYP11B2; | Adrenal Gland | 2312 |
| | | CYP11B1 | | |
| SMFPLLTFRA | HLA-A02:01 | CYP11B1 | Adrenal Gland | 2313 |
| LLMTLFELA | HLA-A02:01 | CYP11B2; | Adrenal Gland | 2314 |
| | | CYP11B1 | | |
| LLMILFEL | HLA-A02:01 | CYP11B2; | Adrenal Gland | 2315 |
| | | CYP11B1 | | |
| MLPEDVEKL | HLA-A02:01 | CYP11B2; | Adrenal Gland | 2316 |
| | | CYP11B1 | | |
| SIFHYTIEA | HLA-A02:01 | CYP11B2; | Adrenal Gland | 2317 |
| | | CYP11B1 | | |
| ILRPSMFPL | HLA-A02:01 | CYP11B1 | Adrenal Gland | 2318 |
| ALFGERLGL | HLA-A02:01 | CYP11B2; | Adrenal Gland | 2319 |
| | | CYP11B1 | | |
| RLAEAEMLLL | HLA-A02:01 | CYP11B2; | Adrenal Gland | 2320 |
| | | CYP11B1 | | |
| ALFGERLGLV | HLA-A02:01 | CYP11B2; | Adrenal Gland | 2321 |
| | | CYP11B1 | | |
| SLHPHRMSL | HLA-A02:01 | CYP11B1 | Adrenal Gland | 2322 |
| TLFELARNPNV | HLA-A02:01 | CYP11B1 | Adrenal Gland | 2323 |
| RLAEAEMLLLL | HLA-A02:01 | CYP11B2; | Adrenal Gland | 2324 |
| | | CYP11B1 | | |
| TVFPLLMTL | HLA-A02:01 | CYP11B1 | Adrenal Gland | 2325 |
| RSLSRWTSPK | HLA-A03:01 | CYP11B1 | Adrenal Gland | 2326 |
| SLSRWTSPK | HLA-A03:01 | CYP11B1 | Adrenal Gland | 2327 |
| FLHALEVMFK | HLA-A03:01 | CYP11B2; | Adrenal Gland | 2328 |
| | | CYP11B1 | | |
| SMFPLLTFR | HLA-A03:01 | CYP11B1 | Adrenal Gland | 2329 |
| LMFMPRSLSR | HLA-A03:01 | CYP11B2; | Adrenal Gland | 2330 |
| | | CYP11B1 | | |
| RLYPVGLFL | HLA-A03:01 | CYP11B2; | Adrenal Gland | 2331 |
| | | CYP11B1 | | |
| RLYPVGLFLER | HLA-A03:01 | CYP11B2; | Adrenal Gland | 2332 |
| | | CYP11B1 | | |
| ALFPRPERY | HLA-A03:01 | CYP11B2; | Adrenal Gland | 2333 |
| | | CYP11B1 | | |
| RVFLYSLGR | HLA-A03:01 | CYP11B1 | Adrenal Gland | 2334 |
| SLSRWTSPK | HLA-A11:01 | CYP11B1 | Adrenal Gland | 2335 |
| SMFPLLTFR | ILA-A11:01 | CYP11B1 | Adrenal Gland | 2336 |
| RSLSRWTSPK | HLA-A11:01 | CYP11B1 | Adrenal Gland | 2337 |
| RVFLYSLGR | HLA-A11:0] | CYP11B1 | Adrenal Gland | 2338 |
| ATTELPLLR | HLA-A11:01 | CYP11B2; | Adrenal Gland | 2339 |
| | | CYP11B1 | | |
| STGSPIQLR | HLA-A11:01 | CYP11B1 | Adrenal Gland | 2340 |
| QTFQELGPIFR | HLA-A11:01 | CYP11B2; | Adrenal Gland | 2341 |
| | | CYP11B1 | | |
| ASISEHPQK | HLA-A11:01 | CYP11B2; | Adrenal Gland | 2342 |
| | | CYP11B1 | | |
| RWLRLLQIW | HLA-A24:02 | CYP11B2; | Adrenal Gland | 2343 |
| | | CYP11B1 | | |
| RYNPQRWLDI | HLA-A24:02 | CYP11B2; | Adrenal Gland | 2344 |
| | | CYP11B1 | | |
| VFPLLMTLF | HLA-A24:02 | CYP11B1 | Adrenal Gland | 2345 |
| RNFYHVPFGF | HLA-A24:02 | CYP11B1 | Adrenal Gland | 2346 |
| MFKSTVQLMF | HLA-A24:02 | CYP11B2; | Adrenal Gland | 2347 |
| | | CYP11B1 | | |
| QYTSIVAEL | HLA-A24:02 | CYP11B1 | Adrenal Gland | 2348 |
| TFQELGPIF | HLA-A24:02 | CYP11B2; | Adrenal Gland | 2349 |
| | | CYP11B1 | | |
| NFYHVPFGF | HLA-A24:02 | CYP11B1 | Adrenal Gland | 2350 |
| RSRHSASFG | HLA-A30:01 | CYP11B1 | Adrenal Gland | 2351 |
| RSLSRWTSPK | HLA-A30:01 | CYP11B1 | Adrenal Gland | 2352 |
| RAKAEVCMA | HLA-A30:01 | CYP11B1 | Adrenal Gland | 2353 |
| AYRQHRGHK | HLA-A30:01 | CYP11B2; | Adrenal Gland | 2354 |
| | | CYP11B1 | | |
| ASISEHPQK | HLA-A30:01 | CYP11B2; | Adrenal Gland | 2355 |
| | | CYP11B1 | | |
| QYGDNCIQK | HLA-A30:01 | CYP11B2; | Adrenal Gland | 2356 |
| | | CYP11B1 | | |
| ALKETLRLY | HLA-A30:01 | CYP11B2; | Adrenal Gland | 2357 |
| | | CYP11B1 | | |
| RWTSPKVWK | HLA-A30:01 | CYP11B1 | Adrenal Gland | 2358 |
| SMFPLLTFR | HLA-A33:03 | CYP11B1 | Adrenal Gland | 2359 |
| MSLEPWVAYR | HLA-A33:03 | CYP11B1 | Adrenal Gland | 2360 |
| HISASFGRWGR | HLA-A33:03 | CYP11B1 | Adrenal Gland | 2361 |
| SASFGRWGR | HLA-A33:03 | CYP11B1 | Adrenal Gland | 2362 |
| MFMPRSLSR | HLA-A33:03 | CYP11B2; | Adrenal Gland | 2363 |
| | | CYP11B1 | | |
| EVLSPNAVQR | HLA-A33:03 | CYP11B1 | Adrenal Gland | 2364 |
| ELGPIFRSR | HLA-A33:03 | CYP11B1 | Adrenal Gland | 2365 |
| STGSPIQLR | HLA-A33:03 | CYP11B1 | Adrenal Gland | 2366 |
| MPRRPGNRWL | HLA-B07:02 | CYP11B1 | Adrenal Gland | 2367 |
| HPQKATTEL | HLA-B07:02 | CYP11B2; | Adrenal Gland | 2368 |
| | | CYP11B1 | | |
| SPIQLRTLSM | HLA-B07:02 | CYP11B1 | Adrenal Gland | 2369 |
| RPQQYTSIV | HLA-B07:02 | CYP11B1 | Adrenal Gland | 2370 |
| SPSSASLNF | HLA-B07:02 | CYP11B2; | Adrenal Gland | 2371 |
| | | CYP11B1 | | |
| RPSMFPLLTF | HLA-B07:02 | CYP11B1 | Adrenal Gland | 2372 |
| SLHPHRMSL | HLA-B08:01 | CYP11B1 | Adrenal Gland | 2373 |
| NAVQRFLPM | HLA-B08:01 | CYP11B1 | Adrenal Gland | 2374 |
| MLLLLHHVL | HLA-B08:01 | CYP11B2; | Adrenal Gland | 2375 |
| | | CYP11B1 | | |
| WLSLQRAQAL | HLA-B08:01 | CYP11B1 | Adrenal Gland | 2376 |
| DIKMVYSF | HLA-B08:01 | CYP11B2; | Adrenal Gland | 2377 |
| | | CYP11B1 | | |
| SQALKKKVL | HLA-B08:01 | CYP11B2; | Adrenal Gland | 2378 |
| | | CYP11B1 | | |
| QALKKKVL | HLA-B08:01 | CYP11B2; | Adrenal Gland | 2379 |
| | | CYP11B1 | | |
| SLNFLHAL | HLA-B08:01 | CYP11B2; | Adrenal Gland | 2380 |
| | | CYP11B1 | | |
| AEAEMLLLL | HLA-B13:02 | CYP11B2; | Adrenal Gland | 2381 |
| | | CYP11B1 | | |
| LNFLHALEV | HLA-B13:02 | CYP11B2; | Adrenal Gland | 2382 |
| | | CYP11B1 | | |
| KEHFEAWDCI | HLA-B13:02 | CYP11B2; | Adrenal Gland | 2383 |
| | | CYP11B1 | | |
| AEMLLLLHHV | HLA-B13:02 | CYP11B2; | Adrenal Gland | 2384 |
| | | CYP11B1 | | |
| RLYPVGLFL | HLA-B13:02 | CYP11B2; | Adrenal Gland | 2385 |
| | | CYP11B1 | | |
| YGDNCIQKI | HLA-B13:02 | CYP11B2; | Adrenal Gland | 2386 |
| | | CYP11B1 | | |
| GQDSEALKY | HLA-B13:02 | CYP11B1 | Adrenal Gland | 2387 |
| RQHRGHKC | HLA-B13:02 | CYP11B2; | Adrenal Gland | 2388 |
| | | CYP11B1 | | |
| LAFSRPQQY | HLA-B46:01 | CYP11B1 | Adrenal Gland | 2389 |
| YSFILRPSM | HLA-B46:01 | CYP11B1 | Adrenal Gland | 2390 |
| YTIEASNLAL | HLA-B46:01 | CYP11B2; | Adrenal Gland | 2391 |
| | | CYP11B1 | | |
| MSLEPWVAY | HLA-B46:01 | CYP11B1 | Adrenal Gland | 2392 |
| VARDESQAL | HLA-B46:01 | CYP11B2; | Adrenal Gland | 2393 |
| | | CYP11B1 | | |
| SLHPHRMSL | HLA-B46:01 | CYP11B1 | Adrenal Gland | 2394 |
| AARVPRTVL | HLA-B46:01 | CYP11B1 | Adrenal Gland | 2395 |
| SLHPHRMSL | HLA-C01:02 | CYP11B1 | Adrenal Gland | 2396 |
| SMDAPTSRL | HLA-C01:02 | CYP11B1 | Adrenal Gland | 2397 |
| YSLGRNPAL | HLA-C01:02 | CYP11B1 | Adrenal Gland | 2398 |
| RVPRTVLPF | HLA-C01:02 | CYP11B1 | Adrenal Gland | 2399 |
| NGPEWRFNRL | HLA-C01:02 | CYP11B2; | Adrenal Gland | 2400 |
| | | CYP11B1 | | |
| HSPSSASL | HLA-C01:02 | CYP11B2; | Adrenal Gland | 2401 |
| | | CYP11B1 | | |
| MLPEDVEKL | HLA-C01:02 | CYP11B2; | Adrenal Gland | 2402 |
| | | CYP11B1 | | |
| ELPLLRAAL | HLA-C01:02 | CYP11B2; | Adrenal Gland | 2403 |
| | | CYP11B1 | | |
| YSLGRNPAL | HLA-C03:04 | CYP11B1 | Adrenal Gland | 2404 |
| YSFILRPSM | HLA-C03:04 | CYP11B1 | Adrenal Gland | 2405 |
| NAVQRFLPM | HLA-C03:04 | CYP11B1 | Adrenal Gland | 2406 |
| YTIEASNLAL | HLA-C03:04 | CYP11B2; | Adrenal Gland | 2407 |
| | | CYP11B1 | | |
| VARDFSQAL | HLA-C03:04 | CYP11B2; | Adrenal Gland | 2408 |
| | | CYP11B1 | | |
| MAVPWLSL | HLA-C03:04 | CYP11B1 | Adrenal Gland | 2409 |
| SLHPHRMSL | HLA-C03:04 | CYP11B1 | Adrenal Gland | 2410 |
| RYDLGGAGM | HLA-C04:01 | CYP11B1 | Adrenal Gland | 2411 |
| KYDLGGAGM | HLA-C04:01 | CYP11B1 | Adrenal Gland | 2412 |
| FRYDLGGAGM | HLA-C04:01 | CYP11B1 | Adrenal Gland | 2413 |
| SMDAPTSRL | HLA-C04:01 | CYP11B1 | Adrenal Gland | 2414 |
| TLDVQPSIF | HLA-C04:01 | CYP11B2; | Adrenal Gland | 2415 |
| | | CYP11B1 | | |
| VFPLLMTLF | HLA-C04:01 | CYP11B1 | Adrenal Gland | 2416 |
| FRSRHSASF | HLA-C07:01 | CYP11B1 | Adrenal Gland | 2417 |
| MRQCLGRRL | HLA-C07:01 | CYP11B2; | Adrenal Gland | 2418 |
| | | CYP11B1 | | |
| ERYNPQRWL | HLA-C07:01 | CYP11B2; | Adrenal Gland | 2419 |
| | | CYP11B1 | | |
| SRLYPVGLFL | HLA-C07:01 | CYP11B1 | Adrenal Gland | 2420 |
| RYNPQRWL | HLA-C07:01 | CYP11B2; | Adrenal Gland | 2421 |
| | | CYP11B1 | | |
| RRPGNRWL | HLA-C07:01 | CYP11B1 | Adrenal Gland | 2422 |
| CRNGPEWRF | HLA-C07:01 | CYP11B1 | Adrenal Gland | 2423 |
| FRSRHSASF | HLA-C07:02 | CYP11B1 | Adrenal Gland | 2424 |
| LRPSMPPLL | HLA-C07:02 | CYP11B1 | Adrenal Gland | 2425 |
| MFKSTVQLM | HLA-C07:02 | CYP11B2; | Adrenal Gland | 2426 |
| | | CYP11B1 | | |
| MRQCLGRRL | HLA-C07:02 | CYP11B2; | Adrenal Gland | 2427 |
| | | CYP11B1 | | |
| FKSTVQLMF | HLA-C07:02 | CYP11B2; | Adrenal Gland | 2428 |
| | | CYP11B1 | | |
| ARVPRTVL | HLA-C07:02 | CYP11B1 | Adrenal Gland | 2429 |
| NYHIPAGVL | HLA-C07:02 | CYP11B1 | Adrenal Gland | 2430 |
| VSSDLVLQNY | HLA-A01:01 | CYP11B2 | Adrenal Gland | 2431 |
| GTLVQVFLY | HLA-A01:01 | CYP11B2 | Adrenal Gland | 2432 |
| VVSSDLVLQNY | HLA-A01:01 | CYP11B2 | Adrenal Gland | 2433 |
| AGTLVQVFLY | HLA-A01:01 | CYP11B2 | Adrenal Gland | 2434 |
| ILEPWVAY | HLA-A01:01 | CYP11B2 | Adrenal Gland | 2435 |
| YTGIVAELL | HLA-A01:01 | CYP11B2 | Adrenal Gland | 2436 |
| SLSRWISPKV | HLA-A02:01 | CYP11B2 | Adrenal Gland | 2437 |
| FILRPGTSPL | HLA-A02:01 | CYP11B2 | Adrenal Gland | 2438 |
| RMILEPWVA | HLA-A02:01 | CYP11B2 | Adrenal Gland | 2439 |
| LLLKAELSL | HLA-A02:01 | CYP11B2 | Adrenal Gland | 2440 |
| FLVETLTQEDI | HLA-A02:01 | CYP11B2 | Adrenal Gland | 2441 |
| LLHHVLKHFL | HLA-A02:01 | CYP11B2 | Adrenal Gland | 2442 |
| FLYSLGRNA | HLA-A02:01 | CYP11B2 | Adrenal Gland | 2443 |
| TLVQVFLYSL | HLA-A02:01 | CYP11B2 | Adrenal Gland | 2444 |
| AFPLLMTLFEL | HLA-A02:01 | CYP11B2 | Adrenal Gland | 2445 |
| FLVETLTQE | HLA-A02:01 | CYP11B2 | Adrenal Gland | 2446 |
| IPAGTLVQV | HLA-A02:01 | CYP11B2 | Adrenal Gland | 2447 |
| TLFELARNPDV | HLA-A02:01 | CYP11B2 | Adrenal Gland | 2448 |
| IVAELLLKA | HLA-A02:01 | CYP11B2 | Adrenal Gland | 2449 |
| ILRPGTSPLL | HLA-A02:01 | CYP11B2 | Adrenal Gland | 2450 |
| FLYSLGRNAA | HLA-A02:01 | CYP11B2 | Adrenal Gland | 2451 |
| RSLSRWISPK | HLA-A03:01 | CYP11B2 | Adrenal Gland | 2452 |
| SLSRWISPK | HLA-A03:01 | CYP11B2 | Adrenal Gland | 2453 |
| RLNPDVLSPK | HLA-A03:01 | CYP11B2 | Adrenal Gland | 2454 |
| MILEPWVAY | HLA-A03:01 | CYP11B2 | Adrenal Gland | 2455 |
| SLSRWISPK | HLA-A11:01 | CYP11B2 | Adrenal Gland | 2456 |
| RSLSRWISPK | HLA-A11:01 | CYP11B2 | Adrenal Gland | 2457 |
| GTSPLLTFR | HLA-A11:01 | CYP11B2 | Adrenal Gland | 2458 |
| GIVAELLLK | HLA-A11:01 | CYP11B2 | Adrenal Gland | 2459 |
| RWISPKVWK | HLA-A11:01 | CYP11B2 | Adrenal Gland | 2460 |
| RNFHHVPFGF | HLA-A24:02 | CYP11B2 | Adrenal Gland | 2461 |
| LYSLGRNAALF | HLA-A24:02 | CYP11B2 | Adrenal Gland | 2462 |
| AFPLLMTLF | HLA-A24:02 | CYP11B2 | Adrenal Gland | 2463 |
| HYTGIVAEL | HLA-A24:02 | CYP11B2 | Adrenal Gland | 2464 |
| NFHHVPPGF | HLA-A24:02 | CYP11B2 | Adrenal Gland | 2465 |
| RARALGTRA | HLA-A30:01 | CYP11B2 | Adrenal Gland | 2466 |
| RSLSRWISPK | HLA-A30:01 | CYP11B2 | Adrenal Gland | 2467 |
| RARALGTRAA | HLA-A30:01 | CYP11B2 | Adrenal Gland | 2468 |
| RWISPKVWK | HLA-A30:01 | CYP11B2 | Adrenal Gland | 2469 |
| LSRWISPKV | HLA-A30:01 | CYP11B2 | Adrenal Gland | 2470 |
| MILEPWVAYR | HLA-A33:03 | CYP11B2 | Adrenal Gland | 2471 |
| GTRAARAPR | HLA-A33:03 | CYP11B2 | Adrenal Gland | 2472 |
| YSLGRNAALFPR | HLA-A33:03 | CYP11B2 | Adrenal Gland | 2473 |
| DVLSPKAVQR | HLA-A33:03 | CYP11B2 | Adrenal Gland | 2474 |
| IYQELAFNR | HLA-A33:03 | CYP11B2 | Adrenal Gland | 2475 |
| SPLLTFRAI | HLA-B07:02 | CYP11B2 | Adrenal Gland | 2476 |
| RPQHYTGIV | HLA-B07:02 | CYP11B2 | Adrenal Gland | 2477 |
| AARAPRTVL | HLA-B07:02 | CYP11B2 | Adrenal Gland | 2478 |
| GPRMVCVML | HLA-B07:02 | CYP11B2 | Adrenal Gland | 2479 |
| SPKAVQRFL | HLA-B07:02 | CYP11B2 | Adrenal Gland | 2480 |
| WLSLQRARAL | HLA-B08:01 | CYP11B2 | Adrenal Gland | 2481 |
| KAVQRFLPM | HLA-B08:01 | CYP11B2 | Adrenal Gland | 2482 |
| SPKAVQRFLPM | HLA-B08:01 | CYP11B2 | Adrenal Gland | 2483 |
| ELLLKAEL | HLA-B08:01 | CYP11B2 | Adrenal Gland | 2484 |
| HHVLKHEL | HLA-B08:01 | CYP11B2 | Adrenal Gland | 2485 |
| HPGNRWLRL | HLA-B08:01 | CYP11B2 | Adrenal Gland | 2486 |
| LERVVSSDLV | HLA-B13:02 | CYP11B2 | Adrenal Gland | 2487 |
| LEMHQTFQEL | HLA-B13:02 | CYP11B2 | Adrenal Gland | 2488 |
| VDTTAFPLL | HLA-B13:02 | CYP11B2 | Adrenal Gland | 2489 |
| EQGYEHLHL | HLA-B13:02 | CYP11B2 | Adrenal Gland | 2490 |
| ARNPDVQQI | HLA-B13:02 | CYP11B2 | Adrenal Gland | 2491 |
| RNPDVQQI | HLA-B13:02 | CYP11B2 | Adrenal Gland | 2492 |
| KAVQRFLPM | HLA-B46:01 | CYP11B2 | Adrenal Gland | 2493 |
| LAFNRPQHY | HLA-B46:01 | CYP11B2 | Adrenal Gland | 2494 |
| RAPRTVLPF | HLA-B46:01 | CYP11B2 | Adrenal Gland | 2495 |
| MILEPWVAY | HLA-B46:01 | CYP11B2 | Adrenal Gland | 2496 |
| ILEPWVAY | HLA-B46:01 | CYP11B2 | Adrenal Gland | 2497 |
| ILRPGTSPL | HLA-B46:01 | CYP11B2 | Adrenal Gland | 2498 |
| YSLGRNAAL | HLA-C01:02 | CYP11B2 | Adrenal Gland | 2499 |
| ILRPGTSPL | HLA-C01:02 | CYP11B2 | Adrenal Gland | 2500 |
| RAPRTVLPF | HLA-C01:02 | CYP11B2 | Adrenal Gland | 2501 |
| LRPGTSPL | HLA-C01:02 | CYP11B2 | Adrenal Gland | 2502 |
| AFPLLMTL | HLA-C01:02 | CYP11B2 | Adrenal Gland | 2503 |
| YSLGRNAAL | HLA-C03:04 | CYP11B2 | Adrenal Gland | 2504 |
| TAFPLLMTL | HLA-C03:04 | CYP11B2 | Adrenal Gland | 2505 |
| KAVQRFLPM | HLA-C03:04 | CYP11B2 | Adrenal Gland | 2506 |
| VAAPWLSL | HLA-C03:04 | CYP11B2 | Adrenal Gland | 2507 |
| RYNLGGPRM | HLA-C04:01 | CYP11B2 | Adrenal Gland | 2508 |
| GYEHLHLEM | HLA-C04:01 | CYP11B2 | Adrenal Gland | 2509 |
| HYTGIVAEL | HLA-C04:01 | CYP11B2 | Adrenal Gland | 2510 |
| AFPLLMTLF | HLA-C04:01 | CYP11B2 | Adrenal Gland | 2511 |
| AFPLLMTL | HLA-C04:01 | CYP11B2 | Adrenal Gland | 2512 |
| FRYNLGGPRM | HLA-C07:01 | CYP11B2 | Adrenal Gland | 2513 |
| LRPGTSPLL | HLA-C07:01 | CYP11B2 | Adrenal Gland | 2514 |
| FRYNLGGPRMV | HLA-C07:01 | CYP11B2 | Adrenal Gland | 2515 |
| RNPDVQQIL | HLA-C07:01 | CYP11B2 | Adrenal Gland | 2516 |
| ARNPDVQQI | HLA-C07:01 | CYP11B2 | Adrenal Gland | 2517 |
| ARAPRTVL | HLA-C07:01 | CYP11B2 | Adrenal Gland | 2518 |
| HYTGIVAEL | HLA-C07:02 | CYP11B2 | Adrenal Gland | 2519 |
| LRPGTSPLL | HLA-C07:02 | CYP11B2 | Adrenal Gland | 2520 |
| FRYNLGGPRM | HLA-C07:02 | CYP11B2 | Adrenal Gland | 2521 |
| ARAPRTVL | HLA-C07:02 | CYP11B2 | Adrenal Gland | 2522 |
| ARNPDVQQIL | HLA-C07:02 | CYP11B2 | Adrenal Gland | 2523 |
| MAVREDLYCFSY | HLA-A01:01 | DCAF4L2 | Liver | 2524 |
| WSCAWSLSIHAY | HLA-A01:01 | DCAF4L2 | Liver | 2525 |
| SSDVLAQQF | HLA-A01:01 | DCAF4L2 | Liver | 2526 |
| LMAVREDLY | HLA-A01:01 | DCAF4L2 | Liver | 2527 |
| QVEAGGSKY | HLA-A01:01 | DCAF4L2 | Liver | 2528 |
| HLDSHLLLC | HLA-A01:01 | DCAF4L2 | Liver | 2529 |
| LTTPELRVY | HLA-A01:01 | DCAF4L2 | Liver | 2530 |
| ILQDGQFLV | HLA-A02:01 | DCAF4L2 | Liver | 2531 |
| VLLPASLFI | HLA-A02:01 | DCAF4L2 | Liver | 2532 |
| RVYPHKTLYV | HLA-A02:01 | DCAF4L2 | Liver | 2533 |
| AVLLPASLFI | HLA-A02:01 | DCAF4L2 | Liver | 2534 |
| SMCWASLNHL | HLA-A02:01 | DCAF4L2 | Liver | 2535 |
| QILQDGQFLV | HLA-A02:01 | DCAF4L2 | Liver | 2536 |
| SLFIGSFPGM | HLA-A02:01 | DCAF4L2 | Liver | 2537 |
| FLRFANYCRI | HLA-A02:01 | DCAF4L2 | Liver | 2538 |
| QQFAIMTPL | HLA-A02:01 | DCAF4L2 | Liver | 2539 |
| GLADTPSCAVLL | HLA-A02:01 | DCAF4L2 | Liver | 2540 |
| GLADTPSCAV | HLA-A02:01 | DCAF4L2 | Liver | 2541 |
| GLADTPSCA | HLA-A02:01 | DCAF4L2 | Liver | 2542 |
| GLTTPELRV | HLA-A02:01 | DCAF4L2 | Liver | 2543 |
| TLYVPNRKV | HLA-A02:01 | DCAF4L2 | Liver | 2544 |
| HLLLCFVGL | HLA-A02:01 | DCAF4L2 | Liver | 2545 |
| SLNHLDSHLL | HLA-A02:01 | DCAF4L2 | Liver | 2546 |
| GLNAPSMLRK | HLA-A03:01 | DCAF4L2 | Liver | 2547 |
| RVYPHKTLY | HLA-A03:01 | DCAF4L2 | Liver | 2548 |
| KLWDLRATK | HLA-A03:01 | DCAF4L2 | Liver | 2549 |
| KTLYVPNRKT | HLA-A11:01 | DCAF4L2 | Liver | 2550 |
| GLNAPSMLRK | HLA-A11:01 | DCAF4L2 | Liver | 2551 |
| RVYPHKTLY | HLA-A11:01 | DCAF4L2 | Liver | 2552 |
| GTIKLWDLR | HLA-A11:01 | DCAF4L2 | Liver | 2553 |
| SSLASDRFNR | HLA-A11:01 | DCAF4L2 | Liver | 2554 |
| QFAIMTPLLF | HLA-A24:02 | DCAF4L2 | Liver | 2555 |
| KYGIITMRQL | HLA-A24:02 | DCAF4L2 | Liver | 2556 |
| AWSCAWSLSI | HLA-A24:02 | DCAF4L2 | Liver | 2557 |
| AYLPVHVNE | HLA-A24:02 | DCAF4L2 | Liver | 2558 |
| VYPHKTLYV | HLA-A24:02 | DCAF4L2 | Liver | 2559 |
| RVYPHKTLYV | HLA-A30:01 | DCAF4L2 | Liver | 2560 |
| ASDRFNRILA | HLA-A30:01 | DCAF4L2 | Liver | 2561 |
| RVYPHKTLY | HLA-A30:01 | DCAF4L2 | Liver | 2562 |
| KLWDLRATK | HLA-A30:01 | DCAF4L2 | Liver | 2563 |
| GSKYGIIM | HLA-A30:01 | DCAF4L2 | Liver | 2564 |
| RVSCMQRKK | HLA-A30:01 | DCAF4L2 | Liver | 2565 |
| FANYCRIAR | HLA-A33:03 | DCAF4L2 | Liver | 2566 |
| FLRFANYCR | HLA-A33:03 | DCAF4L2 | Liver | 2567 |
| CYTRIWSLR | HLA-A33:03 | DCAF4L2 | Liver | 2568 |
| SKYGIITMR | HLA-A33:03 | DCAF4L2 | Liver | 2569 |
| ELRVSCMQR | HLA-A33:03 | DCAF4L2 | Liver | 2570 |
| FPGMRRPGM | HLA-B07:02 | DCAF4L2 | Liver | 2571 |
| APSMLRKNQL | HLA-B07:02 | DCAF4L2 | Liver | 2572 |
| VPNRKVNSM | HLA-B07:02 | DCAF4L2 | Liver | 2573 |
| LPASLFIGSF | HLA-B07:02 | DCAF4L2 | Liver | 2574 |
| FPGMRRPGML | HLA-B08:01 | DCAF4L2 | Liver | 2575 |
| FPGMRRPGM | HLA-B08:01 | DCAF4L2 | Liver | 2576 |
| CMQRKKVQI | HLA-B08:01 | DCAF4L2 | Liver | 2577 |
| DAWSCAWSL | HLA-B08:01 | DCAF4L2 | Liver | 2578 |
| TGTIKLWDL | HLA-B08:01 | DCAF4L2 | Liver | 2579 |
| PSMLRKNQL | HLA-B08:01 | DCAF4L2 | Liver | 2580 |
| WSCAWSLSI | HLA-B13:02 | DCAF4L2 | Liver | 2581 |
| LDSHLLLCFV | HLA-B13:02 | DCAF4L2 | Liver | 2582 |
| QQFAIMTPLL | HLA-B13:02 | DCAF4L2 | Liver | 2583 |
| SQQVLLTNV | HLA-B13:02 | DCAF4L2 | Liver | 2584 |
| GLTTPELRV | HLA-B13:02 | DCAF4L2 | Liver | 2585 |
| TLYVPNRKV | HLA-B13:02 | DCAF4L2 | Liver | 2586 |
| FAIMTPLLF | HLA-B46:01 | DCAF4L2 | Liver | 2587 |
| LSIHAYHSF | HLA-B46:01 | DCAF4L2 | Liver | 2588 |
| LLTTIPSPY | HLA-B46:01 | DCAF4L2 | Liver | 2589 |
| FQIPDAWSC | HLA-B46:01 | DCAF4L2 | Liver | 2590 |
| SIHAYHSF | HLA-B46:01 | DCAF4L2 | Liver | 2591 |
| WSLRHGHLL | HLA-C01:02 | DCAF4L2 | Liver | 2592 |
| FAIMTPLLF | HLA-C01:02 | DCAF4L2 | Liver | 2593 |
| LADTPSCAV | HLA-C01:02 | DCAF4L2 | Liver | 2594 |
| YVPNRKVNSM | HLA-C01:02 | DCAF4L2 | Liver | 2595 |
| YLPVHVNEE | HLA-C01:02 | DCAF4L2 | Liver | 2596 |
| LSHDSAVTSL | HLA-C01:02 | DCAF4L2 | Liver | 2597 |
| FAIMTPLLF | HLA-C03:04 | DCAF4L2 | Liver | 2598 |
| SAVTSLQIL | HLA-C03:04 | DCAF4L2 | Liver | 2599 |
| LANTNTDQL | HLA-C03:04 | DCAF4L2 | Liver | 2600 |
| FAIMTPLL | HLA-C03:04 | DCAF4L2 | Liver | 2601 |
| FANYCRIAREL | HLA-C03:04 | DCAF4L2 | Liver | 2602 |
| SHDSAVTSL | HLA-C04:01 | DCAF4L2 | Liver | 2603 |
| FRGAPGLLM | HLA-C04:01 | DCAF4L2 | Liver | 2604 |
| FAIMTPLLF | HLA-C04:01 | DCAF4L2 | Liver | 2605 |
| LWDLRATKC | HLA-C04:01 | DCAF4L2 | Liver | 2606 |
| HLDSHLLL | HLA-C04:01 | DCAF4L2 | Liver | 2607 |
| FRGAPGLLM | HLA-C07:01 | DCAF4L2 | Liver | 2608 |
| LRFANYCRI | HLA-C07:01 | DCAF4L2 | Liver | 2609 |
| LRKNQLGFL | HLA-C07:01 | DCAF4L2 | Liver | 2610 |
| RRPGMLCSF | HLA-C07:01 | DCAF4L2 | Liver | 2611 |
| MRGLTTPEL | HLA-C07:01 | DCAF4L2 | Liver | 2612 |
| CRSGEIFGI | HLA-C07:01 | DCAF4L2 | Liver | 2613 |
| FRGAPGLLM | HLA-C07:02 | DCAF4L2 | Liver | 2614 |
| RRPGMLCSF | HLA-C07:02 | DCAF4L2 | Liver | 2615 |
| LRFANYCRI | HLA-C07:02 | DCAF4L2 | Liver | 2616 |
| NYCRIAREL | HLA-C07:02 | DCAF4L2 | Liver | 2617 |
| FRGAPGLL | HLA-C07:02 | DCAF4L2 | Liver | 2618 |
| YVISAPSIY | HLA-A01:01 | DLL3 | Glioma | 2619 |
| FSGLVCACAPGY | HLA-A01:01 | DLL3 | Glioma | 2620 |
| RSFECTCPRQFY | HLA-A01:01 | DLL3 | Glioma | 2621 |
| CTCPRGFY | HLA-A01:01 | DLL3 | Glioma | 2622 |
| DVDPQGIY | HLA-A01:01 | DLL3 | Glioma | 2623 |
| GADPDSAY | HLA-A01:01 | DLL3 | Glioma | 2624 |
| DVDPQGIYV | HLA-A01:01 | DLL3 | Glioma | 2625 |
| LLFPYPSSI | HLA-A02:01 | DLL3 | Glioma | 2626 |
| YMGARCEFPV | HLA-A02:01 | DLL3 | Glioma | 2627 |
| YLLPPALGL | HLA-A02:01 | DLL3 | Glioma | 2628 |
| YLLPPALGLL | HLA-A02:01 | DLL3 | Glioma | 2629 |
| LLFPYPSSILSV | HLA-A02:01 | DLL3 | Glioma | 2630 |
| RLPCRLFFRV | HLA-A02:01 | DLL3 | Glioma | 2631 |
| LLFPYPSSIL | HLA-A02:01 | DLL3 | Glioma | 2632 |
| ALPDALNNL | HLA-A02:01 | DLL3 | Glioma | 2633 |
| YLLPPALGLLV | HLA-A02:01 | DLL3 | Glioma | 2634 |
| LPLPDGLLQV | HLA-A02:01 | DLL3 | Glioma | 2635 |
| PLPDGLLQV | HLA-A02:01 | DLL3 | Glioma | 2636 |
| GLLSQTVIL | HLA-A02:01 | DLL3 | Glioma | 2637 |
| LLAGTPEPSV | HLA-A02:01 | DLL3 | Glioma | 2638 |
| ALPAAPPGL | HLA-A02:01 | DLL3 | Glioma | 2639 |
| GLLSQTVILA | HLA-A02:01 | DLL3 | Glioma | 2640 |
| RIFFRVCLK | HLA-A03:01 | DLL3 | Glioma | 2641 |
| CRLFFRVCLK | HLA-A03:01 | DLL3 | Glioma | 2642 |
| RLFFRVCLKP | HLA-A03:01 | DLL3 | Glioma | 2643 |
| LPCRLFFRVCLK | HLA-A03:01 | DLL3 | Glioma | 2644 |
| SLLARVAGR | HLA-A03:01 | DLL3 | Glioma | 2645 |
| RLAAGGPWAR | HLA-A03:01 | DLL3 | Glioma | 2646 |
| YLLPPALGL | HLA-A03:01 | DLL3 | Glioma | 2647 |
| RLFFRVCLK | HLA-A11:01 | DLL3 | Glioma | 2648 |
| STSSCLSPR | HLA-A11:01 | DLL3 | Glioma | 2649 |
| RSFECTCPR | HLA-A11:01 | DLL3 | Glioma | 2650 |
| VISAPSIYAR | HLA-A11:01 | DLL3 | Glioma | 2651 |
| GTFSFILET | HLA-A11:01 | DLL3 | Glioma | 2652 |
| GTFSFIIETWR | HLA-A11:01 | DLL3 | Glioma | 2653 |
| YVISAPSIYAR | HLA-A11:01 | DLL3 | Glioma | 2654 |
| IYAREVATPLF | HLA-A24:02 | DLL3 | Glioma | 2655 |
| RYLLPPALGL | HLA-A24:02 | DLL3 | Glioma | 2656 |
| GYMGARCEF | HLA-A24:02 | DLL3 | Glioma | 2657 |
| TFSFILETW | HLA-A24:02 | DLL3 | Glioma | 2658 |
| IYVISAPSI | HLA-A24:02 | DLL3 | Glioma | 2659 |
| AYICHCPPGF | HLA-A24:02 | DLL3 | Glioma | 2660 |
| VPELQIHSF | HLA-A24:02 | DLL3 | Glioma | 2661 |
| RARCEPPAV | HLA-A30:01 | DLL3 | Glioma | 2662 |
| RLFFRVCLK | HLA-A30:01 | DLL3 | Glioma | 2663 |
| RVAGRRRLA | HLA-A30:01 | DLL3 | Glioma | 2664 |
| CTRLCRPRSA | HLA-A30:01 | DLL3 | Glioma | 2665 |
| QTFSFIIET | HLA-A30:01 | DLL3 | Glioma | 2666 |
| STSSCLSPR | HLA-A33:03 | DLL3 | Glioma | 2667 |
| FSFIIETWR | HLA-A33:03 | DLL3 | Glioma | 2668 |
| TFSFIIETWR | HLA-A33:03 | DLL3 | Glioma | 2669 |
| ELRFSYRAR | HLA-A33:03 | DLL3 | Glioma | 2670 |
| YVISAPSIYAR | HLA-A33:03 | DLL3 | Glioma | 2671 |
| ECEAPLVCR | HLA-A33:03 | DLL3 | Glioma | 2672 |
| ISAPSIYAR | HLA-A33:03 | DLL3 | Glioma | 2673 |
| APRSPCSARL | HLA-B07:02 | DLL3 | Glioma | 2674 |
| SPRGPSSAT | HLA-B07:02 | DLL3 | Glioma | 2675 |
| SPRMSGLL | HLA-B07:02 | DLL3 | Glioma | 2676 |
| SPCALGAAL | HLA-B07:02 | DLL3 | Glioma | 2677 |
| QPGAPAPDL | HLA-B07:02 | DLL3 | Glioma | 2678 |
| VAGRRRLAA | HLA-B08:01 | DLL3 | Glioma | 2679 |
| ALRCRCRAGF | HLA-B08:01 | DLL3 | Glioma | 2680 |
| YMGARCEFPV | HLA-B08:01 | DLL3 | Glioma | 2681 |
| YAREVATPL | HLA-B08:01 | DLL3 | Glioma | 2682 |
| TPEPSVHAL | HLA-B08:01 | DLL3 | Glioma | 2683 |
| YPSSILSV | HLA-B08:01 | DLL3 | Glioma | 2684 |
| CLDLGHAL | HLA-B08:01 | DLL3 | Glioma | 2685 |
| VILALIFL | HLA-B08:01 | DLL3 | Glioma | 2686 |
| SQTVILALI | HLA-B13:02 | DLL3 | Glioma | 2687 |
| RDAWPGTFSFII | HLA-B13:02 | DLL3 | Glioma | 2688 |
| WELRFSYRA | HLA-B13:02 | DLL3 | Glioma | 2689 |
| RDAWPGTFSF | HLA-B13:02 | DLL3 | Glioma | 2690 |
| LSQTVILALI | HLA-B13:02 | DLL3 | Glioma | 2691 |
| DQIGGGLCL | HLA-B13:02 | DLL3 | Glioma | 2692 |
| PLPDGLLQV | HLA-B13:02 | DLL3 | Glioma | 2693 |
| ALIFLPQTR | HLA-B13:02 | DLL3 | Glioma | 2694 |
| YVISAPSIY | HLA-B46:01 | DLL3 | Glioma | 2695 |
| YAREVATPL | HLA-B46:01 | DLL3 | Glioma | 2696 |
| YAREVATPLF | HLA-B46:01 | DLL3 | Glioma | 2697 |
| LLFPYPSSI | HLA-B46:01 | DLL3 | Glioma | 2698 |
| DAWPGTFSF | HLA-B46:01 | DLL3 | Glioma | 2699 |
| WARDIQRAG | HLA-B46:01 | DLL3 | Glioma | 2700 |
| FIIETWREE | HLA-B46:01 | DLL3 | Glioma | 2701 |
| LLPPALGLL | HLA-C01:02 | DLL3 | Glioma | 2702 |
| YAREVATPL | HLA-C01:02 | DLL3 | Glioma | 2703 |
| YLLPPALGL | HLA-C01:02 | DLL3 | Glioma | 2704 |
| LLFPYPSSI | HLA-C01:02 | DLL3 | Glioma | 2705 |
| VHPDGASAL | HLA-C01:02 | DLL3 | Glioma | 2706 |
| ALPDALNNL | HLA-C01:02 | DLL3 | Glioma | 2707 |
| SAPSRCGPGL | HLA-C01:02 | DLL3 | Glioma | 2708 |
| TVPVSTSSCL | HLA-C01:02 | DLL3 | Glioma | 2709 |
| YAREVATPL | HLA-C03:04 | DLL3 | Glioma | 2710 |
| VATPLFPPL | HLA-C03:04 | DLL3 | Glioma | 2711 |
| YLLPPALGL | HLA-C03:04 | DLL3 | Glioma | 2712 |
| LLFPYPSSI | HLA-C03:04 | DLL3 | Glioma | 2713 |
| FILETWREEL | HLA-C03:04 | DLL3 | Glioma | 2714 |
| YAHFSGLVC | HLA-C03:04 | DLL3 | Glioma | 2715 |
| FRDAWPGTF | HLA-C04:01 | DLL3 | Glioma | 2716 |
| LFPYPSSIL | HLA-C04:01 | DLL3 | Glioma | 2717 |
| SQDAGSRLL | HLA-C04:01 | DLL3 | Glioma | 2718 |
| LLPPALGLL | HLA-C04:01 | DLL3 | Glioma | 2719 |
| VFELQIHSF | HLA-C04:01 | DLL3 | Glioma | 2720 |
| SFECTCPRGF | HLA-C04:01 | DLL3 | Glioma | 2721 |
| FRDAWPGTF | HLA-C07:01 | DLL3 | Glioma | 2722 |
| TRPAGVFEL | HLA-C07:01 | DLL3 | Glioma | 2723 |
| QRYLLPPAL | HLA-C07:01 | DLL3 | Glioma | 2724 |
| FRVCLKPGL | HLA-C07:01 | DLL3 | Glioma | 2725 |
| ARLPCRLFF | HLA-C07:01 | DLL3 | Glioma | 2726 |
| RPGDPQRYL | HLA-C07:01 | DLL3 | Glioma | 2727 |
| ARGPVYTEQ | HLA-C07:01 | DLL3 | Glioma | 2728 |
| ARGPVYTE | HLA-C07:01 | DLL3 | Glioma | 2729 |
| FRDAWPGTP | HLA-C07:02 | DLL3 | Glioma | 2730 |
| TRPAGVFEL | HLA-C07:02 | DLL3 | Glioma | 2731 |
| ARLPCRLFF | HLA-C07:02 | DLL3 | Glioma | 2732 |
| QRYLLPPAL | HLA-C07:02 | DLL3 | Glioma | 2733 |
| GYMGARCEF | HLA-C07:02 | DLL3 | Glioma | 2734 |
| ARGPVYTEQ | HLA-C07:02 | DLL3 | Glioma | 2735 |
| LRPGDPQRY | HLA-C07:02 | DLL3 | Glioma | 2736 |
| FTDFVRPLNI | HLA-A01:01 | DMRTB | Testis | 2737 |
| GGDFQPSYY | HLA-A01:01 | DMRTB1 | Testis | 2738 |
| FGAEAAGSGY | HLA-A01:01 | DMRTB1 | Testis | 2739 |
| VSEPGGDFQPSY | HLA-A01:01 | DMRTB1 | Testis | 2740 |
| FTDFVRPLN | HLA-A01:01 | DMRTB1 | Testis | 2741 |
| YLPPPPPPL | HLA-A02:01 | DMRTB1 | Testis | 2742 |
| FLPPGYLSA | HLA-A02:01 | DMRTB1 | Testis | 2743 |
| FLPPGYLSAL | HLA-A02:01 | DMRTB1 | Testis | 2744 |
| SMHPYCPFPL | HLA-A02:01 | DMRTB1 | Testis | 2745 |
| YLSALHFL | HLA-A02:0] | DMRTB1 | Testis | 2746 |
| YLDAPPGVPL | HLA-A02:01 | DMRTB1 | Testis | 2747 |
| SLAGPPFGA | HLA-A02:01 | DMRTB1 | Testis | 2748 |
| YLDAPPGV | HLA-A02:01 | DMRTB1 | Testis | 2749 |
| YLISERQKIMAA | HLA-A02:01 | DMRTB1 | Testis | 2750 |
| GYLDAPPGV | HLA-A02:01 | DMRTB1 | Testis | 2751 |
| YLISERQKI | HLA-A02:01 | DMRTB1 | Testis | 2752 |
| KIMAAQKVLK | HLA-A03:01 | DMRTB1 | Testis | 2753 |
| IMAAQKVLK | HLA-A03:01 | DMRTB1 | Testis | 2754 |
| RQKIMAAQKVLK | HLA-A03:01 | DMRTB1 | Testis | 2755 |
| HPYCPFPLGY | HLA-A03:01 | DMRTB1 | Testis | 2756 |
| ALQPVLGGR | HLA-A03:01 | DMRTB1 | Testis | 2757 |
| KIMAAQKVLK | HLA-A11:01 | DMRTB1 | Testis | 2758 |
| IMAAQKVLK | HLA-A11:01 | DMRTB1 | Testis | 2759 |
| AALCAQGPK | HLA-A11:01 | DMRTB1 | Testis | 2760 |
| SSFSLTVLF | HLA-A11:01 | DMRTB1 | Testis | 2761 |
| RTVPGPLFT | HLA-A11:01 | DMRTB1 | Testis | 2762 |
| ACFFEQPPR | HLA-A11:01 | DMRTB1 | Testis | 2763 |
| GYLSALHFL | HLA-A24:02 | DMRTB1 | Testis | 2764 |
| PGYLSALHFL | HLA-A24:02 | DMRTB1 | Testis | 2765 |
| GYLSALHF | HLA-A24:02 | DMRTB1 | Testis | 2766 |
| YYLPPPPPPL | HLA-A24:02 | DMRTB1 | Testis | 2767 |
| PPPPPPSSF | HLA-A24:02 | DMRTB1 | Testis | 2768 |
| RGRNPGPRA | HLA-A30:01 | DMRTB1 | Testis | 2769 |
| RQKIMAAQK | HLA-A30:01 | DMRTB1 | Testis | 2770 |
| RCRNHGFLV | HLA-A30:01 | DMRTB1 | Testis | 2771 |
| RWKQCLCEK | HLA-A30:01 | DMRTB1 | Testis | 2772 |
| KCYLISERQK | HLA-A30:01 | DMRTB1 | Testis | 2773 |
| MVRTPKCSR | HLA-A33:03 | DMRTB1 | Testis | 2774 |
| CFFEQPPRGR | HLA-A33:03 | DMRTB1 | Testis | 2775 |
| KMVRTPKCSR | HLA-A33:03 | DMRTB1 | Testis | 2776 |
| EKCYLISER | HLA-A33:03 | DMRTB1 | Testis | 2777 |
| FFEQPPRGR | HLA-A33:03 | DMRTB1 | Testis | 2778 |
| DADPGPEGR | HLA-A33:03 | DMRTB1 | Testis | 2779 |
| RPMRTVPGPL | HLA-B07:02 | DMRTB1 | Testis | 2780 |
| VPAASLRPL | HLA-B07:02 | DMRTB1 | Testis | 2781 |
| GPLDLRRPM | HLA-B07:02 | DMRTB1 | Testis | 2782 |
| APVPVPAASL | HLA-B07:02 | DMRTB1 | Testis | 2783 |
| GPRALQPVI | HLA-B07:02 | DMRTB1 | Testis | 2784 |
| YLISERQKIMAA | HLA-B08:01 | DMRTB1 | Testis | 2785 |
| SERQKIMAA | HLA-B08:01 | DMRTB1 | Testis | 2786 |
| YLISERQKIM | HLA-B08:01 | DMRTB1 | Testis | 2787 |
| NINPDRAL | HLA-B08:01 | DMRTB1 | Testis | 2788 |
| CLCEKCYL | HLA-B08:01 | DMRTB1 | Testis | 2789 |
| VPVPAASL | HLA-B08:01 | DMRTB1 | Testis | 2790 |
| RNHQFLVPV | HLA-B13:02 | DMRTB1 | Testis | 2791 |
| GDFQPSYYL | HLA-B13:02 | DMRTB1 | Testis | 2792 |
| FTDFVRPLNI | HLA-B13:02 | DMRTB1 | Testis | 2793 |
| YLISERQKI | HLA-B13:02 | DMRTB1 | Testis | 2794 |
| SQYQGGGLV | HLA-B13:02 | DMRTB1 | Testis | 2795 |
| RQKIMAAQKV | HLA-B13:02 | DMRTB1 | Testis | 2796 |
| SSMHPYCPF | HLA-B46:01 | DMRTB1 | Testis | 2797 |
| SSFSLTVLF | HLA-B46:01 | DMRTB1 | Testis | 2798 |
| YLPPPPPPL | HLA-B46:01 | DMRTB1 | Testis | 2799 |
| SMHPYCPF | HLA-B46:01 | DMRTB1 | Testis | 2800 |
| FLPPGYLSA | HLA-B46:01 | DMRTB1 | Testis | 2801 |
| YLPPPPPPL | HLA-C01:02 | DMRTB1 | Testis | 2802 |
| FLPPGYLSAL | HLA-C01:02 | DMRTB1 | Testis | 2803 |
| YLDAPPGVPL | HLA-C01:02 | DMRTB1 | Testis | 2804 |
| YCPFPLGYL | HLA-C01:02 | DMRTB1 | Testis | 2805 |
| AAAPAPVPV | HLA-C03:04 | DMRTB1 | Testis | 2806 |
| AAAAAPAPV | HLA-C03:04 | DMRTB1 | Testis | 2807 |
| RAAVAMPSL | HLA-C03:04 | DMRTB1 | Testis | 2808 |
| SGYPGPLDL | HLA-C03:04 | DMRTB1 | Testis | 2809 |
| YLPPPPPPL | HLA-C03:04 | DMRTB1 | Testis | 2810 |
| YLPPPPPPL | HLA-C04:01 | DMRTB1 | Testis | 2811 |
| YLDAPPGVPL | HLA-C04:01 | DMRTB1 | Testis | 2812 |
| YYLPPPPPPL | HLA-C04:01 | DMRTB1 | Testis | 2813 |
| SFSLTVLF | HLA-C04:01 | DMRTB1 | Testis | 2814 |
| NTDDQDAEV | HLA-C04:01 | DMRTB1 | Testis | 2815 |
| FTDFVRPL | HLA-C04:01 | DMRTB1 | Testis | 2816 |
| FRHVSRSQY | HLA-C07:01 | DMRTB1 | Testis | 2817 |
| MRTVPGPLF | HLA-C07:01 | DMRTB1 | Testis | 2818 |
| GRNPGPRAL | HLA-C07:01 | DMRTB1 | Testis | 2819 |
| SGYPGPLDL | HLA-C07:01 | DMRTB1 | Testis | 2820 |
| CRNHGFLVP | HLA-C07:01 | DMRTB1 | Testis | 2821 |
| FRHVSRSQY | HLA-C07:02 | DMRTB1 | Testis | 2822 |
| MRTVPGPLF | HLA-C07:02 | DMRTB1 | Testis | 2823 |
| LFTDFVRPL | HLA-C07:02 | DMRTB1 | Testis | 2824 |
| GRNPGPRAL | HLA-C07:02 | DMRTB1 | Testis | 2825 |
| YLPPPPPPL | HLA-C07:02 | DMRTB1 | Testis | 2826 |
| ATLEDLQNLY | HLA-A01:01 | EPYC | Ovarian | 2827 |
| TLEDLDNLY | HLA-A01:01 | EPYC | Ovarian | 2828 |
| CTCISTTVY | HLA-A01:01 | EPYC | Ovarian | 2829 |
| TLESINYDSETY | HLA-A01:01 | EPYC | Ovarian | 2830 |
| VTAPTLESINY | HLA-A01:01 | EPYC | Ovarian | 2831 |
| NLYNYENIPV | HLA-A02:01 | EPYC | Ovarian | 2832 |
| TLAGLVLGL | HLA-A02:01 | EPYC | Ovarian | 2833 |
| TLAGLVLGLV | HLA-A02:01 | EPYC | Ovarian | 2834 |
| KTLAGLVLGL | HLA-A02:01 | EPYC | Ovarian | 2835 |
| NLDHIPLPL | HLA-A02:01 | EPYC | Ovarian | 2836 |
| YMCLPRLPV | HLA-A02:01 | EPYC | Ovarian | 2837 |
| YLTDNNLDHI | HLA-A02:01 | EPYC | Ovarian | 2838 |
| GLVIFDAAV | HLA-A02:01 | EPYC | Ovarian | 2839 |
| LLCTCISTTV | HLA-A02:01 | EPYC | Ovarian | 2840 |
| RLDGNPINL | HLA-A02:01 | EPYC | Ovarian | 2841 |
| QLPELPTTL | HLA-A02:01 | EPYC | Ovarian | 2842 |
| SLSDLKRIDL | HLA-A02:01 | EPYC | Ovarian | 2843 |
| KLPQLRELV | HLA-A02:01 | EPYC | Ovarian | 2844 |
| KDMYDLHHLY | HLA-A03:01 | EPYC | Ovarian | 2845 |
| RLDGNPINLSK | HLA-A03:01 | EPYC | Ovarian | 2846 |
| ISNNRLGRK | HLA-A03:01 | EPYC | Ovarian | 2847 |
| HELDAIPPLPK | HLA-A03:01 | EPYC | Ovarian | 2848 |
| ELDAIPPLPK | HLA-A03:01 | EPYC | Ovarian | 2849 |
| TAYFYSRENR | HLA-A11:01 | EPYC | Ovarian | 2850 |
| ATVMPSGNR | HLA-A11:01 | EPYC | Ovarian | 2851 |
| ISNNRLGRK | HLA-A11:01 | EPYC | Ovarian | 2852 |
| LTPPPQPEK | HLA-A11:01 | EPYC | Ovarian | 2853 |
| SRFNRIKKINK | HLA-A11:01 | EPYC | Ovarian | 2854 |
| AYFYSRFNR | HLA-A11:01 | EPYC | Ovarian | 2855 |
| YFYSRFNRI | HLA-A24:02 | EPYC | Ovarian | 2856 |
| AYFYSRFNRI | HLA-A24:02 | EPYC | Ovarian | 2857 |
| TYIRKALEDI | HLA-A24:02 | EPYC | Ovarian | 2858 |
| PELPTTLTF | HLA-A24:02 | EPYC | Ovarian | 2859 |
| MYDLHHLYL | HLA-A24:02 | EPYC | Ovarian | 2860 |
| YSRFNRIKK | HLA-A30:01 | EPYC | Ovarian | 2861 |
| RFNRIKKINK | HLA-A30:01 | EPYC | Ovarian | 2862 |
| FYSRFNRIKK | HLA-A30:01 | EPYC | Ovarian | 2863 |
| NVKNLTYIRK | HLA-A30:01 | EPYC | Ovarian | 2864 |
| TAYFYSRFNR | HLA-A33:03 | EPYC | Ovarian | 2865 |
| NVKNLTYIR | HLA-A33:03 | EPYC | Ovarian | 2866 |
| AYFYSRFNR | HLA-A33:03 | EPYC | Ovarian | 2867 |
| TFIDISNNR | HLA-A33:03 | EPYC | Ovarian | 2868 |
| LPRLPVGSL | HLA-B07:02 | EPYC | Ovarian | 2869 |
| CLPRLPVGSL | HLA-B07:02 | EPYC | Ovarian | 2870 |
| YMCLPRLPVGSL | HLA-B07:02 | EPYC | Ovarian | 2871 |
| MCLPRLPVGSL | HLA-B07:02 | EPYC | Ovarian | 2872 |
| SPQEPEFTGV | HLA-B07:02 | EPYC | Ovarian | 2873 |
| LPRLPVGSLV | HLA-B07:02 | EPYC | Ovarian | 2874 |
| LPQLRELVI | HLA-B08:01 | EPYC | Ovarian | 2875 |
| LTYIRKAL | HLA-B08:01 | EPYC | Ovarian | 2876 |
| YFYSRFNRI | HLA-B08:01 | EPYC | Ovarian | 2877 |
| DMYDLHHL | HLA-B08:01 | EPYC | Ovarian | 2878 |
| LPELPTTL | HLA-B08:01 | EPYC | Ovarian | 2879 |
| LPENLRAL | HLA-B08:01 | EPYC | Ovarian | 2880 |
| HELDAIPPL | HLA-B13:02 | EPYC | Ovarian | 2881 |
| YENIPVDKV | HLA-B13:02 | EPYC | Ovarian | 2882 |
| RELVLRDNKI | HLA-B13:02 | EPYC | Ovarian | 2883 |
| RQLPELPTT | HLA-B13:02 | EPYC | Ovarian | 2884 |
| SRFNRIKKI | HLA-B13:02 | EPYC | Ovarian | 2885 |
| KVEIEIATV | HLA-B13:02 | EPYC | Ovarian | 2886 |
| LQNNNILEM | HLA-B46:01 | JEPYC | Ovarian | 2887 |
| LTSNLISEI | HLA-B46:01 | EPYC | Ovarian | 2888 |
| LSKTPQAYM | HLA-B46:01 | EPYC | Ovarian | 2889 |
| SINYDSETY | HLA-B46:01 | EPYC | Ovarian | 2890 |
| FCNVKNLTY | HLA-B46:01 | EPYC | Ovarian | 2891 |
| LSKTPQAY | HLA-B46:01 | EPYC | Ovarian | 2892 |
| VMPSGNREL | HLA-C01:02 | EPYC | Ovarian | 2893 |
| FIDISNNRL | HLA-C01:02 | EPYC | Ovarian | 2894 |
| KTPQAYMCL | HLA-C01:02 | EPYC | Ovarian | 2895 |
| QLPELPTTL | HLA-C01:02 | EPYC | Ovarian | 2896 |
| FDAAVTAPTL | HLA-C03:04 | EPYC | Ovarian | 2897 |
| LQNNNILEM | HLA-C03:04 | EPYC | Ovarian | 2898 |
| VTAPTLESI | HLA-C03:04 | EPYC | Ovarian | 2899 |
| TVYCDDHEL | HLA-C03:04 | EPYC | Ovarian | 2900 |
| AAVTAPTI | HLA-C03:04 | EPYC | Ovarian | 2901 |
| DAAVTAPTL | HLA-C03:04 | EPYC | Ovarian | 2902 |
| KTLAGLVL | HLA-C03:04 | EPYC | Ovarian | 2903 |
| MYDLHHLYL | HLA-C04:01 | EPYC | Ovarian | 2904 |
| FIDISNNRL | HLA-C04:01 | EPYC | Ovarian | 2905 |
| TYDATLEDL | HLA-C04:01 | EPYC | Ovarian | 2906 |
| IFDAAVTAP | HLA-C04:01 | EPYC | Ovarian | 2907 |
| SRFNRIKKI | HLA-C07:01 | EPYC | Ovarian | 2908 |
| LRDNKIRQL | HLA-C07:01 | EPYC | Ovarian | 2909 |
| FRKLPQLREL | HLA-C07:01 | EPYC | Ovarian | 2910 |
| KRIDLTSNL | HLA-C07:01 | EPYC | Ovarian | 2911 |
| YNYENIPVD | HLA-C07:01 | EPYC | Ovarian | 2912 |
| RDNKIRQL | HLA-C07:01 | EPYC | Ovarian | 2913 |
| MYDLHHLYL | HLA-C07:02 | EPYC | Ovarian | 2914 |
| YFYSRENRI | HLA-C07:02 | EPYC | Ovarian | 2915 |
| LRDNKIRQL | HLA-C07:02 | EPYC | Ovarian | 2916 |
| VYCDDHEL | HLA-C07:02 | EPYC | Ovarian | 2917 |
| KRIDLTSNL | HLA-C07:02 | EPYC | Ovarian | 2918 |
| NKNDFASL | HLA-C07:02 | EPYC | Ovarian | 2919 |
| LTSLTILQLY | HLA-A01:01 | G6PC2 | Pancreas | 2920 |
| IPTHEEHLFY | HLA-A01:01 | G6PC2 | Pancreas | 2921 |
| PTHEEHLFY | HLA-A01:01 | G6PC2 | Pancreas | 2922 |
| LSCRGGNNY | HLA-A01:01 | G6PC2 | Pancreas | 2923 |
| FLFAVGFYL | HLA-A02:01 | G6PC2 | Pancreas | 2924 |
| VLNIDLLWSV | HLA-A02:01 | G6PC2 | Pancreas | 2925 |
| FLFAVGFYLL | HLA-A02:01 | G6PC2 | Pancreas | 2926 |
| RLTWSFLWSV | HLA-A02:01 | G6PC2 | Pancreas | 2927 |
| AMGASCVWYV | HLA-A02:01 | G6PC2 | Pancreas | 2928 |
| FLWSVFWLI | HLA-A02:01 | G6PC2 | Pancreas | 2929 |
| LTWSFLWSV | HLA-A02:01 | G6PC2 | Pancreas | 2930 |
| NLFLFLFAV | HLA-A02:01 | G6PC2 | Pancreas | 2931 |
| RLLCALTSL | HLA-A02:01 | G6PC2 | Pancreas | 2932 |
| FIATHFPHQV | HLA-A02:01 | G6PC2 | Pancreas | 2933 |
| FLWSVFWLIQI | HLA-A02:01 | G6PC2 | Pancreas | 2934 |
| FLWSVFWL | HLA-A02:01 | G6PC2 | Pancreas | 2935 |
| VLFGLGFAI | HLA-A02:01 | G6PC2 | Pancreas | 2936 |
| HLFYVLSFCK | HLA-A03:01 | G6PC2 | Pancreas | 2937 |
| MLMKQSGKK | HLA-A03:01 | G6PC2 | Pancreas | 2938 |
| LLWSVPIAK | HLA-A03:01 | G6PC2 | Pancreas | 2939 |
| VIGDWLNLIFK | HLA-A03:01 | G6PC2 | Pancreas | 2940 |
| LLWSVPIAKK | HLA-A03:01 | G6PC2 | Pancreas | 2941 |
| QTASLGTYLK | HLA-A11:01 | G6PC2 | Pancreas | 2942 |
| HLFYVLSFCK | HLA-A11:01 | G6PC2 | Pancreas | 2943 |
| TASLGTYLK | HLA-A11:01 | G6PC2 | Pancreas | 2944 |
| GVLIIQHLQK | HLA-A11:01 | G6PC2 | Pancreas | 2945 |
| AVIGDWLNLIFK | HLA-A11:01 | G6PC2 | Pancreas | 2946 |
| AVGFYLLLR | HLA-A11:01 | G6PC2 | Pancreas | 2947 |
| TYLKTNLFLF | HLA-A24:02 | G6PC2 | Pancreas | 2948 |
| IYFPLCFQF | HLA-A24:02 | G6PC2 | Pancreas | 2949 |
| TWSFLWSVF | HLA-A24:02 | G6PC2 | Pancreas | 2950 |
| NYTLSFRLL | HLA-A24:02 | G6PC2 | Pancreas | 2951 |
| KDYRAYYTFL | HLA-A30:01 | G6PC2 | Pancreas | 2952 |
| GTKMIWVAV | HLA-A30:01 | G6PC2 | Pancreas | 2953 |
| KTNLFLFLFA | HLA-A30:01 | G6PC2 | Pancreas | 2954 |
| WLNLIFKWK | HLA-A30:01 | G6PC2 | Pancreas | 2955 |
| SVFWLIQISV | HLA-A30:01 | G6PC2 | Pancreas | 2956 |
| IFKWILFGHR | HLA-A33:03 | G6PC2 | Pancreas | 2957 |
| NSEMFLLSCR | HLA-A33:03 | G6PC2 | Pancreas | 2958 |
| FMSNVGDPR | HLA-A33:03 | G6PC2 | Pancreas | 2959 |
| DKFSITLHR | HLA-A33:03 | G6PC2 | Pancreas | 2960 |
| EMFLLSCR | HLA-A33:03 | G6PC2 | Pancreas | 2961 |
| NNYTLSFR | HLA-A33:03 | G6PC2 | Pancreas | 2962 |
| TPGIQTASL | HLA-B07:02 | G6PC2 | Pancreas | 2963 |
| YPNHSSPCL | HLA-B07:02 | G6PC2 | Pancreas | 2964 |
| IPYSVHMLM | HLA-B07:02 | G6PC2 | Pancreas | 2965 |
| HTPGIQTASL | HLA-B07:02 | G6PC2 | Pancreas | 2966 |
| RPYWWVQET | HLA-B07:02 | G6PC2 | Pancreas | 2967 |
| YLLLRVLNI | HLA-B08:01 | G6PC2 | Pancreas | 2968 |
| FLHRNGVL | HLA-B08:01 | G6PC2 | Pancreas | 2969 |
| NLIFKWKSI | HLA-B08:01 | G6PC2 | Pancreas | 2970 |
| NLIFKWIL | HLA-B08:01 | G6PC2 | Pancreas | 2971 |
| NLIFKWILF | HLA-B08:01 | G6PC2 | Pancreas | 2972 |
| IDLLWSVPI | HLA-B13:02 | G6PC2 | Pancreas | 2973 |
| MDFLHRNGVLII | HLA-B13:02 | G6PC2 | Pancreas | 2974 |
| MDFLHRNGVLI | HLA-B13:02 | G6PC2 | Pancreas | 2975 |
| FLWSVFWLI | HLA-B13:02 | G6PC2 | Pancreas | 2976 |
| WLIQISVCI | HLA-B13:02 | G6PC2 | Pancreas | 2977 |
| SIWPCNGRI | HLA-B13:02 | G6PC2 | Pancreas | 2978 |
| WIHIDTTPF | HLA-B46:01 | G6PC2 | Pancreas | 2979 |
| FAINSEMFI | HLA-B46:01 | G6PC2 | Pancreas | 2980 |
| RAYYTFLNF | HLA-B46:01 | G6PC2 | Pancreas | 2981 |
| ISRVFIATH | HLA-B46:01 | G6PC2 | Pancreas | 2982 |
| LQKDYRAY | HLA-B46:01 | G6PC2 | Pancreas | 2983 |
| FIPYSVHML | HLA-C01:02 | G6PC2 | Pancreas | 2984 |
| FAINSEMFL | HLA-C01:02 | G6PC2 | Pancreas | 2985 |
| GMDKFSITL | HLA-C01:02 | G6PC2 | Pancreas | 2986 |
| IWPCNGRIL | HLA-C01:02 | G6PC2 | Pancreas | 2987 |
| HTPGIQTASL | HLA-C01:02 | G6PC2 | Pancreas | 2988 |
| FAINSEMFL | HLA-C03:04 | G6PC2 | Pancreas | 2989 |
| FAVGFYLLL | HLA-C03:04 | G6PC2 | Pancreas | 2990 |
| LSFCKSASI | HLA-C03:04 | G6PC2 | Pancreas | 2991 |
| FAVGFYLL | HLA-C03:04 | G6PC2 | Pancreas | 2992 |
| IGDWLNLIF | HLA-C04:01 | G6PC2 | Pancreas | 2993 |
| VGDPRNIFF | HLA-C04:01 | G6PC2 | Pancreas | 2994 |
| YPNHSSPCL | HLA-C04:01 | G6PC2 | Pancreas | 2995 |
| FFIYFPLCF | HLA-C04:01 | G6PC2 | Pancreas | 2996 |
| AFIPYSVHM | HLA-C04:01 | G6PC2 | Pancreas | 2997 |
| HRHAGGRGL | HLA-C07:01 | G6PC2 | Pancreas | 2998 |
| YRAYYTFLNF | HLA-C07:01 | G6PC2 | Pancreas | 2999 |
| LRVLNIDLL | HLA-C07:01 | G6PC2 | Pancreas | 3000 |
| CRGGNNYTL | HLA-C07:01 | G6PC2 | Pancreas | 3001 |
| NRCPEPHCL | HLA-C07:01 | G6PC2 | Pancreas | 3002 |
| THFPHQVIL | HLA-C07:01 | G6PC2 | Pancreas | 3003 |
| YRAYYTFLNF | HLA-C07:02 | G6PC2 | Pancreas | 3004 |
| AYYTFLNFM | HLA-C07:02 | G6PC2 | Pancreas | 3005 |
| LRVLNIDLL | HLA-C07:02 | G6PC2 | Pancreas | 3006 |
| SRVFIATHF | HLA-C07:02 | G6PC2 | Pancreas | 3007 |
| IYFPLCFQF | HLA-C07:02 | G6PC2 | Pancreas | 3008 |
| NRCPEPHCL | HLA-C07:02 | G6PC2 | Pancreas | 3009 |
| ATDLEKHPY | HLA-A01:01 | HMGB4 | Testis | 3010 |
| TATDLEKHPY | HLA-A01:01 | HMGB4 | Testis | 3011 |
| WSTATDLEKHPY | HLA-A01:01 | HMGB4 | Testis | 3012 |
| YFEELELY | HLA-A01:01 | HMGB4 | Testis | 3013 |
| VSSYVHFLLNY | HLA-A01:01 | HMGB4 | Testis | 3014 |
| YQEEMMNYV | HLA-A02:01 | HMGB4 | Testis | 3015 |
| LLFCQDHYA | HLA-A02:01 | HMGB4 | Testis | 3016 |
| FLLFCQDHYA | HLA-A02:01 | HMGB4 | Testis | 3017 |
| FLLFCQDHYAQL | HLA-A02:01 | HMGB4 | Testis | 3018 |
| KMWSTATDL | HLA-A02:01 | HMGB4 | Testis | 3019 |
| LLFCQDHYAQL | HLA-A02:01 | HMGB4 | Testis | 3020 |
| NVSSYVHFL | HLA-A02:01 | HMGB4 | Testis | 3021 |
| LLRAKYFEEL | HLA-A02:01 | HMGB4 | Testis | 3022 |
| SFLLFCQDHYA | HLA-A02:01 | HMGB4 | Testis | 3023 |
| AKYEALAKL | HLA-A02:01 | HMGB4 | Testis | 3024 |
| FCQDHYAQL | HLA-A02:01 | HMGB4 | Testis | 3025 |
| FLLNYRNKF | HLA-A02:01 | HMGB4 | Testis | 3026 |
| ALAKLDKA | HLA-A02:01 | HMGB4 | Testis | 3027 |
| LLNYRNKFK | HLA-A03:01 | HMGB4 | Testis | 3028 |
| MMNYVGKRK | HLA-A03:01 | HMGB4 | Testis | 3029 |
| MMNYVGKRKK | HLA-A03:01 | HMGB4 | Testis | 3030 |
| SSYVHFLLNY | HLA-A03:01 | HMGB4 | Testis | 3031 |
| RVALLRAK | HLA-A03:01 | HMGB4 | Testis | 3032 |
| RVALLRAKY | HLA-A03:01 | HMGB4 | Testis | 3033 |
| SSYVHFLLNY | HLA-A11:01 | HMGB4 | Testis | 3034 |
| SSYVHFLLNYR | HLA-A11:01 | HMGB4 | Testis | 3035 |
| YVGFKEFSRK | HLA-A11:01 | HMGB4 | Testis | 3036 |
| SYVHFLLNYR | HLA-A11:01 | HMGB4 | Testis | 3037 |
| STATDLEK | HLA-A11:01 | HMGB4 | Testis | 3038 |
| SVVQVAKATGK | HLA-A11:01 | HMGB4 | Testis | 3039 |
| VGFKEFSRK | HLA-A11:01 | HMGB4 | Testis | 3040 |
| RYQEEMMNYV | HLA-A24:02 | HMGB4 | Testis | 3041 |
| HFLLNYRNKF | HLA-A24:02 | HMGB4 | Testis | 3042 |
| RPPSSFLLF | HLA-A24:02 | HMGB4 | Testis | 3043 |
| KYFEELELY | HLA-A24:02 | HMGB4 | Testis | 3044 |
| RRPPSSFLLF | HLA-A24:02 | HMGB4 | Testis | 3045 |
| KAKYEALAK | HLA-A30:01 | HMGB4 | Testis | 3046 |
| SARNRCRGK | HLA-A30:01 | HMGB4 | Testis | 3047 |
| KYRMSARNR | HLA-A30:01 | HMGB4 | Testis | 3048 |
| KARYQEEMMNYV | HLA-A30:01 | HMGB4 | Testis | 3049 |
| SEKWRSISK | HLA-A30:01 | HMGB4 | Testis | 3050 |
| HFLLNYRNK | HLA-A30:01 | HMGB4 | Testis | 3051 |
| YVHFLLNYR | HLA-A33:03 | HMGB4 | Testis | 3052 |
| SYVHFLLNYR | HLA-A33:03 | HMGB4 | Testis | 3053 |
| TYVGFKEFSR | HLA-A33:03 | HMGB4 | Testis | 3054 |
| NYVGKRKKR | HLA-A33:03 | HMGB4 | Testis | 3055 |
| EMMNYVGKR | HLA-A33:03 | HMGB4 | Testis | 3056 |
| HPYEQRVAL | HLA-B07:02 | HMGB4 | Testis | 3057 |
| KHPYEQRVAL | HLA-B07:02 | HMGB4 | Testis | 3058 |
| HPYEQRVALL | HLA-B07:02 | HMGB4 | Testis | 3059 |
| EPRRPPSSF | HLA-B07:02 | HMGB4 | Testis | 3060 |
| RPPSSFLLF | HLA-B07:02 | HMGB4 | Testis | 3061 |
| LLRAKYFEEL | HLA-B08:01 | HMGB4 | Testis | 3062 |
| LLRAKYFEELEL | HLA-B08:01 | HMGB4 | Testis | 3063 |
| HPYEQRVAL | HLA-B08:01 | HMGB4 | Testis | 3064 |
| HEKAKYEAL | HLA-B08:01 | HMGB4 | Testis | 3065 |
| EIQLKPKAN | HLA-B08:01 | HMGB4 | Testis | 3066 |
| RENPNWSVV | HLA-B13:02 | HMGB4 | Testis | 3067 |
| YQEEMMNYV | HLA-B13:02 | HMGB4 | Testis | 3068 |
| KEQQPNTYV | HLA-B13:02 | HMGB4 | Testis | 3069 |
| EKHPYEQRV | HLA-B13:02 | HMGB4 | Testis | 3070 |
| AKYFEELEL | HLA-B13:02 | HMGB4 | Testis | 3071 |
| IQLKPKANV | HLA-B13:02 | HMGB4 | Testis | 3072 |
| SSYVHFLLNY | HLA-B46:01 | HMGB4 | Testis | 3073 |
| FLLNYRNKF | HLA-B46:01 | HMGB4 | Testis | 3074 |
| NTYVGFKEF | HLA-B46:01 | HMGB4 | Testis | 3075 |
| LAKLDKARY | HLA-B46:01 | HMGB4 | Testis | 3076 |
| RPPSSFLLF | HLA-C01:02 | HMGB4 | Testis | 3077 |
| VSSYVHFLL | HLA-C01:02 | HMGB4 | Testis | 3078 |
| KMWSTATDL | HLA-C01:02 | HMGB4 | Testis | 3079 |
| RRPPSSFL | HLA-C01:02 | HMGB4 | Testis | 3080 |
| KHPYEQRVAL | HLA-C01:02 | HMGB4 | Testis | 3081 |
| VSSYVHFLL | HLA-C03:04 | HMGB4 | Testis | 3082 |
| HPYEQRVAL | HLA-C03:04 | HMGB4 | Testis | 3083 |
| FCQDHYAQL | HLA-C03:04 | HMGB4 | Testis | 3084 |
| SSYVHFLL | HLA-C03:04 | HMGB4 | Testis | 3085 |
| RPPSSFLLF | HLA-C04:01 | HMGB4 | Testis | 3086 |
| YQEEMMNYV | HLA-C04:01 | HMGB4 | Testis | 3087 |
| RRPPSSFLL | HLA-C04:01 | HMGB4 | Testis | 3088 |
| YFEELELY | HLA-C04:01 | HMGB4 | Testis | 3089 |
| KYFEELEL | HLA-C04:01 | HMGB4 | Testis | 3090 |
| KYEALAKL | HLA-C04:01 | HMGB4 | Testis | 3091 |
| RRPPSSFLL | HLA-C07:01 | HMGB4 | Testis | 3092 |
| LRAKYFEEL | HLA-C07:01 | HMGB4 | Testis | 3093 |
| NVSSYVHFL | HLA-C07:01 | UMGB4 | Testis | 3094 |
| RRPPSSFL | HLA-C07:01 | HMGB4 | Testis | 3095 |
| RRPPSSFLL | HLA-C07:02 | HMGB4 | Testis | 3096 |
| LRAKYFEEL | HLA-C07:02 | HMGB4 | Testis | 3097 |
| RRPPSSFLLF | HLA-C07:02 | HMGB4 | Testis | 3098 |
| KYFEELEL | HLA-C07:02 | HMGB4 | Testis | 3099 |
| SYVHFLLNY | HLA-C07:02 | HMGB4 | Testis | 3100 |
| STNVGSNTY | HLA-A01:01 | IAPP | Pancreas | 3101 |
| SSTNVGSNTY | HLA-A01:01 | IAPP | Pancreas | 3102 |
| LSSTNVGSNTY | HLA-A01:01 | IAPP | Pancreas | 3103 |
| VLKREPLNY | HLA-A01:01 | IAPP | Pancreas | 3104 |
| FLIVLSVAL | HLA-A02:01 | IAPP | Pancreas | 3105 |
| VLSRNILLEL | HLA-A02:01 | IAPP | Pancreas | 3106 |
| VFLIVLSVAL | HLA-A02:01 | IAPP | Pancreas | 3107 |
| VLSVALNHL | HLA-A02:01 | IAPP | Pancreas | 3108 |
| GILKLQVFL | HLA-A02:01 | IAPP | Pancreas | 3109 |
| KLQVFLIVL | HLA-A02:01 | IAPP | Pancreas | 3110 |
| CLDQIPIFTV | HLA-A02:01 | IAPP | Pancreas | 3111 |
| RQEWIIPV | HLA-A02:01 | IAPP | Pancreas | 3112 |
| MGILKLQVFL | HLA-A02:01 | IAPP | Pancreas | 3113 |
| TVFQENHQV | HLA-A02:01 | IAPP | Pancreas | 3114 |
| RLANFLVHS | HLA-A02:01 | IAPP | Pancreas | 3115 |
| CLDQIPIFT | HLA-A02:01 | IAPP | Pancreas | 3116 |
| VLSVALNHLK | HLA-A03:01 | IAPP | Pancreas | 3117 |
| ILLELRGAK | HLA-A03:01 | IAPP | Pancreas | 3118 |
| IVLSVALNHLK | HLA-A03:01 | IAPP | Pancreas | 3119 |
| TVFQENHQVEK | HLA-A03:01 | IAPP | Pancreas | 3120 |
| IVLSVALNH | HLA-A03:01 | IAPP | Pancreas | 3121 |
| LSVALNHLK | HLA-A11:01 | IAPP | Pancreas | 3122 |
| VLSVALNHLK | HLA-A11:01 | IAPP | Pancreas | 3123 |
| IVLSVALNHLK | HLA-A11:01 | IAPP | Pancreas | 3124 |
| TVFQENHQVEK | HLA-A11:01 | IAPP | Pancreas | 3125 |
| ATLPHVQR | HLA-A11:01 | IAPP | Pancreas | 3126 |
| ATPIESHQVEK | HLA-A11:01 | IAPP | Pancreas | 3127 |
| RWKSGNATL | HLA-A24:02 | IAPP | Pancreas | 3128 |
| VQRSAWQIF | HLA-A24:02 | IAPP | Pancreas | 3129 |
| NFLVHSSNNP | HLA-A24:02 | IAPP | Pancreas | 3130 |
| LDQIPIFTVF | HLA-A24:02 | IAPP | Pancreas | 3131 |
| DQIPIFTVF | HLA-A24:02 | IAPP | Pancreas | 3132 |
| RCLDQIPIF | HLA-A24:02 | IAPP | Pancreas | 3133 |
| KSKVIRWKS | HLA-A30:01 | IAPP | Pancreas | 3134 |
| ATQRLANFLV | HLA-A30:01 | IAPP | Pancreas | 3135 |
| KVIRWKSGNA | HLA-A30:01 | IAPP | Pancreas | 3136 |
| KSKVIRWKSGNA | HLA-A30:01 | IAPP | Pancreas | 3137 |
| KSKVIRWK | HLA-A30:01 | IAPP | Pancreas | 3138 |
| QVFLIVLSV | HLA-A30:01 | IAPP | Pancreas | 3139 |
| RWKSGNATL | HLA-A30:01 | IAPP | Pancreas | 3140 |
| NATLPHVQR | HLA-A33:03 | IAPP | Pancreas | 3141 |
| NTATCATQR | HLA-A33:03 | IAPP | Pancreas | 3142 |
| HLKATPIER | HLA-A33:03 | IAPP | Pancreas | 3143 |
| EWIIPVLSR | HLA-A33:03 | IAPP | Pancreas | 3144 |
| IPVLSRNIL | HLA-B07:02 | IAPP | Pancreas | 3145 |
| IPVLSRNILL | HLA-B07:02 | IAPP | Pancreas | 3146 |
| IIPVLSRNIL | HLA-B07:02 | IAPP | Pancreas | 3147 |
| LPHVQRSAW | HLA-B07:02 | IAPP | Pancreas | 3148 |
| LNHLKATPI | HLA-B08:01 | IAPP | Pancreas | 3149 |
| MGILKLQVF | HLA-B08:01 | IAPP | Pancreas | 3150 |
| MGILKLQVFL | HLA-B08:01 | IAPP | Pancreas | 3151 |
| ILKLQVFLI | HLA-B08:01 | IAPP | Pancreas | 3152 |
| ILKLQVFL | HLA-B08:01 | IAPP | Pancreas | 3153 |
| GILKLQVF | HLA-B08:01 | IAPP | Pancreas | 3154 |
| LDQIPIFTV | HLA-B13:02 | IAPP | Pancreas | 3155 |
| IERQEWIIPV | HLA-B13:02 | IAPP | Pancreas | 3156 |
| TQRLANFLV | HLA-B13:02 | IAPP | Pancreas | 3157 |
| IERCLDQIPI | HLA-B13:02 | IAPP | Pancreas | 3158 |
| RQEWIIPVL | HLA-B13:02 | IAPP | Pancreas | 3159 |
| DQIPIFTV | HLA-B13:02 | IAPP | Pancreas | 3160 |
| HVQRSAWQI | HLA-B13:02 | IAPP | Pancreas | 3161 |
| FLVHSSNNF | HLA-B46:01 | IAPP | Pancreas | 3162 |
| STNVQSNTY | HLA-B46:01 | IAPP | Pancreas | 3163 |
| HSSNNFGAI | HLA-B46:01 | IAPP | Pancreas | 3164 |
| VQRSAWQIF | HLA-B46:01 | IAPP | Pancreas | 3165 |
| FLIVLSVAL | HLA-B46:01 | IAPP | Pancreas | 3166 |
| SSNNFGAIL | HLA-C01:02 | IAPP | Pancreas | 3167 |
| LSRNILLEL | HLA-C01:02 | IAPP | Pancreas | 3168 |
| HSSNNFGAI | HLA-C01:02 | IAPP | Pancreas | 3169 |
| IIPVLSRNI | HLA-C01:02 | IAPP | Pancreas | 3170 |
| REPLNYLPL | HLA-C01:02 | IAPP | Pancreas | 3171 |
| TLPHVQRSAW | HLA-C01:02 | IAPP | Pancreas | 3172 |
| VLSVALNHL | HLA-C01:02 | IAPP | Pancreas | 3173 |
| HSSNNFGAI | HLA-C03:04 | IAPP | Pancreas | 3174 |
| SSNNFGAIL | HLA-C03:04 | IAPP | Pancreas | 3175 |
| FLIVLSVAL | HLA-C03:04 | IAPP | Pancreas | 3176 |
| KATPIERCL | HLA-C03:04 | IAPP | Pancreas | 3177 |
| RQEWIIPVL | HLA-C04:01 | IAPP | Pancreas | 3178 |
| SSNNFGAIL | HLA-C04:01 | IAPP | Pancreas | 3179 |
| RWKSGNATL | HLA-C04:01 | IAPP | Pancreas | 3180 |
| HSSNNFGAI | HLA-C04:01 | IAPP | Pancreas | 3181 |
| FLIVLSVAL | HLA-C04:01 | IAPP | Pancreas | 3182 |
| CLDQIPIF | HLA-C04:01 | IAPP | Pancreas | 3183 |
| VLSVALNHL | HLA-C04:01 | IAPP | Pancreas | 3184 |
| ERQEWIIPV | HLA-C07:01 | IAPP | Pancreas | 3185 |
| NTYGKRNAV | HLA-C07:01 | IAPP | Pancreas | 3186 |
| LKREPLNYL | HLA-C07:01 | IAPP | Pancreas | 3187 |
| KRNAVEVL | HLA-C07:01 | IAPP | Pancreas | 3188 |
| SRNILLEL | HLA-C07:01 | IAPP | Pancreas | 3189 |
| RQEWHIPVL | HLA-C07:01 | IAPP | Pancreas | 3190 |
| ERQEWIIPV | HLA-C07:02 | IAPP | Pancreas | 3191 |
| LKREPLNYL | HLA-C07:02 | IAPP | Pancreas | 3192 |
| RWKSGNATL | HLA-C07:02 | IAPP | Pancreas | 3193 |
| KRNAVEVI | HLA-C07:02 | IAPP | Pancreas | 3194 |
| SRNILLEL | HLA-C07:02 | IAPP | Pancreas | 3195 |
| KREPLNYL | HLA-C07:02 | IAPP | Pancreas | 3196 |
| FGDIQEGIY | HLA-A01:01 | KIF2B | Testis | 3197 |
| VTEINRENY | HLA-A01:01 | KIF2B | Testis | 3198 |
| STYEKLDLKVY | HLA-A01:01 | KIF2B | Testis | 3199 |
| PSDNVVMVH | HLA-A01:01 | KIF2B | Testis | 3200 |
| TSCENTLNTLRY | HLA-A01:01 | KIF2B | Testis | 3201 |
| KIDLETILL | HLA-A01:01 | KIF2B | Testis | 3202 |
| YQFTAQPLV | HLA-A02:01 | KIF2B | Testis | 3203 |
| KVYGTFFEI | HLA-A02:01 | KIF2B | Testis | 3204 |
| KLLLADLHV | HLA-A02:01 | KIF2B | Testis | 3205 |
| YALVAQDVFL | HLA-A02:01 | KIF2B | Testis | 3206 |
| ALKECILAL | HLA-A02:01 | KIF2B | Testis | 3207 |
| IMHGKFSLV | HLA-A02:01 | KIF2B | Testis | 3208 |
| ALVAQDVFL | HLA-A02:01 | KIF2B | Testis | 3209 |
| ALVAQDVFLL | HLA-A02:01 | KIF2B | Testis | 3210 |
| RIMHGKFSLV | HLA-A02:01 | KIF2B | Testis | 3211 |
| LLLADLHV | HLA-A02:01 | KIF2B | Testis | 3212 |
| TLKDLDIITV | HLA-A02:01 | KIF2B | Testis | 3213 |
| HLDSSKISV | HLA-A02:01 | KIF2B | Testis | 3214 |
| ALTEIQKKL | HLA-A02:01 | KIF2B | Testis | 3215 |
| GLQEKEVCCV | HLA-A02:01 | KIF2B | Testis | 3216 |
| TLLGKDTTI | HLA-A02:01 | KIF2B | Testis | 3217 |
| VLEDGNQQI | HLA-A02:01 | KIF2B | Testis | 3218 |
| CLWEIQKL | HLA-A02:01 | KIF2B | Testis | 3219 |
| KVYDLLNWK | HLA-A03:01 | KIF2B | Testis | 3220 |
| LLLRNSTYEK | ILA-A03:01 | KIF2B | Testis | 3221 |
| KVYDLLNWKK | HLA-A03:01 | KIF2B | Testis | 3222 |
| RVPSKPCLMK | HLA-A03:01 | KIF2B | Testis | 3223 |
| KVYGTFFEIY | HLA-A03:01 | KIF2B | Testis | 3224 |
| STYEKLDLK | HLA-A03:01 | KIF2B | Testis | 3225 |
| STYEKLDLK | HLA-A11:01 | KIF2B | Testis | 3226 |
| KVYDLLNWK | HLA-A11:01 | KIF2B | Testis | 3227 |
| VETLPTLLGK | HLA-A11:01 | KIF2B | Testis | 3228 |
| KVYDLLNWKK | HLA-A11:01 | KIF2B | Testis | 3229 |
| GTFFEIYGGK | HLA-A11:01 | KIF2B | Testis | 3230 |
| AVFQIILK | HLA-A11:01 | KIF2B | Testis | 3231 |
| RQLEGAEINK | HLA-ALI:01 | KIF2B | Testis | 3232 |
| RYLQNQTFCF | HLA-A24:02 | KIF2B | Testis | 3233 |
| IYALVAQDVF | HLA-A24:02 | KIF2B | Testis | 3234 |
| IYGGKVYDLL | HLA-A24:02 | KIF2B | Testis | 3235 |
| VYQFTAQPL | HLA-A24:02 | KIF2B | Testis | 3236 |
| IYGGKVYDL | HLA-A24:02 | KIF2B | Testis | 3237 |
| RYANRVKKL | HLA-A24:02 | KIF2B | Testis | 3238 |
| RTSRQTPVNA | HLA-A30:01 | KIF2B | Testis | 3239 |
| RVKKLNVDV | HLA-A30:01 | KIF2B | Testis | 3240 |
| RSDKRIHLAV | HLA-A30:01 | KIF2B | Testis | 3241 |
| LLRNSTYEK | HLA-A30:01 | KIF2B | Testis | 3242 |
| KVYDLLNWK | HLA-A30:01 | KIF2B | Testis | 3243 |
| RSLSILEQK | HLA-A30:01 | KIF2B | Testis | 3244 |
| TFFEIYGGK | HLA-A30:01 | KIF2B | Testis | 3245 |
| KVYDLLNWKK | HLA-A30:01 | KIF2B | Testis | 3246 |
| IMHMIEEYR | HLA-A33:03 | KIF2B | Testis | 3247 |
| EIMHMIEEYR | HLA-A33:03 | KIF2B | Testis | 3248 |
| HYPIGHEAPR | HLA-A33:03 | KIF2B | Testis | 3249 |
| NVDVRPYHR | HLA-A33:03 | KIF2B | Testis | 3250 |
| QWLENIQER | HLA-A33:03 | KIF2B | Testis | 3251 |
| EGIYVAIQR | HLA-A33:03 | KIF2B | Testis | 3252 |
| EIQKLQEQR | HLA-A33:03 | KIF2B | Testis | 3253 |
| RPYHRGHYPI | HLA-B07:02 | KIF2B | Testis | 3254 |
| RPLNQRETTL | HLA-B07:02 | KIF2B | Testis | 3255 |
| HPMPPPPLSPL | HLA-B07:02 | KIF2B | Testis | 3256 |
| TPFRASKLIL | HLA-B07:02 | KIF2B | Testis | 3257 |
| MPPPPLSPL | HLA-B07:02 | KIF2B | Testis | 3258 |
| MPPPPLSPLAL | HLA-B07:02 | KIF2B | Testis | 3259 |
| HPMPPPPL | HLA-B07:02 | KIF2B | Testis | 3260 |
| LMKQKKSPCL | HLA-B08:01 | KIF2B | Testis | 3261 |
| LMKQKKSPC | HLA-B08:01 | KIF2B | Testis | 3262 |
| RPYHRGHYPI | HLA-B08:01 | KIF2B | Testis | 3263 |
| EIRARRAL | HLA-B08:01 | KIF2B | Testis | 3264 |
| NWKKKLQVL | HLA-B08:01 | KIF2B | Testis | 3265 |
| EIQKKLKLL | HLA-B08:01 | KIF2B | Testis | 3266 |
| ESKQKVDL | HLA-B08:01 | KIF2B | Testis | 3267 |
| ALKECILAL | HLA-B08:01 | KIF2B | Testis | 3268 |
| YQFTAQPLV | HLA-B13:02 | KIF2B | Testis | 3269 |
| KVYGTFFEL | HLA-B13:02 | KIF2B | Testis | 3270 |
| LDLKVYGTFFEI | HLA-B13:02 | KIF2B | Testis | 3271 |
| IDFCIARSLSI | HLA-B13:02 | KIF2B | Testis | 3272 |
| SLSILEQKI | HLA-B13:02 | KIF2B | Testis | 3273 |
| GQNSSTCMI | HLA-B13:02 | KIF2B | Testis | 3274 |
| LQRDEFIKI | HLA-B13:02 | KIF2B | Testis | 3275 |
| MVHESKQKV | HLA-B13:02 | KIF2B | Testis | 3276 |
| YALVAQDVF | HLA-B46:01 | KIF2B | Testis | 3277 |
| FLLLRNSTY | HLA-B46:01 | KIF2B | Testis | 3278 |
| QTFCFDHAF | HLA-B46:01 | KIF2B | Testis | 3279 |
| RASKLTLVL | HLA-B46:01 | KIF2B | Testis | 3280 |
| EIMHMIEEY | HLA-B46:01 | KIF2B | Testis | 3281 |
| IMHMIEEY | HLA-B46:01 | KIF2B | Testis | 3282 |
| YEIMHMIEEY | HLA-B46:01 | KIF2B | Testis | 3283 |
| HAFDDKASN | HLA-B46:01 | KIF2B | Testis | 3284 |
| MPPPPLSPL | HLA-C01:02 | KIF2B | Testis | 3285 |
| RVPSKPCLM | HLA-C01:02 | KIF2B | Testis | 3286 |
| RASKLTLVL | HLA-C01:02 | KIF2B | Testis | 3287 |
| VAQDVFLLL | HLA-C01:02 | KIF2B | Testis | 3288 |
| CLPESPCL | HLA-C01:02 | KIF2B | Testis | 3289 |
| PMPPPPLSPL | HLA-C01:02 | KIF2B | Testis | 3290 |
| ESPCLSPL | HLA-C01:02 | KIF2B | Testis | 3291 |
| LALAPSSAI | HLA-C03:04 | KIF2B | Testis | 3292 |
| RASKLTLVL | HLA-C03:04 | KIF2B | Testis | 3293 |
| YALVAQDVF | HLA-C03:04 | KIF2B | Testis | 3294 |
| VAQDVFLLL | HLA-C03:04 | KIF2B | Testis | 3295 |
| FCLPESPCL | HLA-C03:04 | KIF2B | Testis | 3296 |
| LALKECILAL | HLA-C03:04 | KIF2B | Testis | 3297 |
| AFDDKASNEL | HLA-C04:01 | KIF2B | Testis | 3298 |
| RVPSKPCLM | HLA-C04:01 | KIF2B | Testis | 3299 |
| YLQNQTFCF | HLA-C04:01 | KIF2B | Testis | 3300 |
| YQFTAQPLV | HLA-C04:01 | KIF2B | Testis | 3301 |
| MPPPPLSPL | HLA-C04:01 | KIF2B | Testis | 3302 |
| NYWVTVEWV | HLA-C04:01 | KIF2B | Testis | 3303 |
| FDDKASNEL | HLA-C04:01 | KIF2B | Testis | 3304 |
| KIDLETILL | HLA-C04:01 | KIF2B | Testis | 3305 |
| FRASKLTLV | HLA-C07:01 | KIF2B | Testis | 3306 |
| FRASKLTLVL | HLA-C07:01 | KIF2B | Testis | 3307 |
| FRKGMATCF | HLA-C07:01 | KIF2B | Testis | 3308 |
| TRYLQNQTP | HLA-C07:01 | KIF2B | Testis | 3309 |
| TRNPNYEIM | HLA-C07:01 | KIF2B | Testis | 3310 |
| ERAGGVHHD | HLA-C07:01 | KIF2B | Testis | 3311 |
| TRNPNYEI | HLA-C07:01 | KIF2B | Testis | 3312 |
| FRASKLTLV | HLA-C07:02 | KIF2B | Testis | 3313 |
| FRASKLTLVL | HLA-C07:02 | KIF2B | Testis | 3314 |
| FRKGMATCF | HLA-C07:02 | KIF2B | Testis | 3315 |
| RYANRVKKL | HLA-C07:02 | KIF2B | Testis | 3316 |
| TRNPNYEIM | HLA-C07:02 | KIF2B | Testis | 3317 |
| VRPYHRGHY | HLA-C07:02 | KIF2B | Testis | 3318 |
| VYGTFFETY | HLA-C07:02 | KIF2B | Testis | 3319 |
| ETKDPTNGYY | HLA-A01:01 | KIRREL2 | Pancreas | 3320 |
| TLETKDPTNGYY | HLA-A01:01 | KIRREL2 | Pancreas | 3321 |
| LETKDPTNGYY | HLA-A01:01 | KIRREL2 | Pancreas | 3322 |
| DTAITLSLQY | HLA-A01:01 | KIRREL2 | Pancreas | 3323 |
| TKDPTNGYY | HLA-A01:01 | KIRREL2 | Pancreas | 3324 |
| TLETKDPINGY | HLA-A01:01 | KIRREL2 | Pancreas | 3325 |
| FLTEPVSCEV | HLA-A02:01 | KIRREL2 | Pancreas | 3326 |
| GLGPQLISV | HLA-A02:01 | KIRREL2 | Pancreas | 3327 |
| FLVETFPA | HLA-A02:01 | KIRREL2 | Pancreas | 3328 |
| TLLMVITGV | HLA-A02:01 | KIRREL2 | Pancreas | 3329 |
| MLRMRVPALL | HLA-A02:01 | KIRREL2 | Pancreas | 3330 |
| VLFGPILQA | HLA-A02:01 | KIRREL2 | Pancreas | 3331 |
| FLCQATAQPPV | HLA-A02:01 | KIRREL2 | Pancreas | 3332 |
| ILQAKPEPV | HLA-A02:01 | KIRREL2 | Pancreas | 3333 |
| FLQQPEDLVVLL | HLA-A02:01 | KIRREL2 | Pancreas | 3334 |
| FLQQPEDLV | HLA-A02:01 | KIRREL2 | Pancreas | 3335 |
| TTLLMVITGV | HLA-A02:01 | KIRREL2 | Pancreas | 3336 |
| LLMVITGV | HLA-A02:01 | KIRREL2 | Pancreas | 3337 |
| TLSASPHTV | HLA-A02:01 | KIRREL2 | Pancreas | 3338 |
| VLLGEEARL | HLA-A02:01 | KIRREL2 | Pancreas | 3339 |
| VLGGPSVSL | HLA-A02:01 | KIRREL2 | Pancreas | 3340 |
| VLVPPEAPQV | HLA-A02:01 | KIRREL2 | Pancreas | 3341 |
| RLGEGGAQA | HLA-A02:01 | KIRREL2 | Pancreas | 3342 |
| ALHSAPAFL | HLA-A02:01 | KIRREL2 | Pancreas | 3343 |
| FLQQPEDLVV | HLA-A02:01 | KIRREL2 | Pancreas | 3344 |
| ATFHQTLLK | HLA-A03:01 | KIRREL2 | Pancreas | 3345 |
| VLFGPILQAK | HLA-A03:01 | KIRREL2 | Pancreas | 3346 |
| GATFHQTLLK | HLA-A03:01 | KIRREL2 | Pancreas | 3347 |
| RLYRARAGY | HLA-A03:01 | KIRREL2 | Pancreas | 3348 |
| VLFGPILQA | HLA-A03:01 | KIRREL2 | Pancreas | 3349 |
| ATAQPPVTGY | HLA-A03:01 | KIRREL2 | Pancreas | 3350 |
| ATFHQTLLK | HLA-A11:01 | KIRREL2 | Pancreas | 3351 |
| GATFHQTLLK | HLA-A11:01 | KIRREL2 | Pancreas | 3352 |
| ASASFSEQK | HLA-A11:01 | KIRREL2 | Pancreas | 3353 |
| VLFGPILQAK | HLA-A11:01 | KIRREL2 | Pancreas | 3354 |
| ATFHQTLLKE | HLA-A11:01 | KIRREL2 | Pancreas | 3355 |
| ATQAGLRSR | HLA-A11:01 | KIRREL2 | Pancreas | 3356 |
| GTQESDFSR | HLA-A11:01 | KIRREL2 | Pancreas | 3357 |
| RVPALLVLLF | HLA-A24:02 | KIRREL2 | Pancreas | 3358 |
| LWFRDGVLL | HLA-A24:02 | KIRREL2 | Pancreas | 3359 |
| SYIKPTSF | HLA-A24:02 | KIRREL2 | Pancreas | 3360 |
| RLPCALGAYW | HLA-A24:02 | KIRREL2 | Pancreas | 3361 |
| LQPPGTPTF | HLA-A24:02 | KIRREL2 | Pancreas | 3362 |
| QYPPEVTL | HLA-A24:02 | KIRREL2 | Pancreas | 3363 |
| PFSHDDGATF | HLA-A24:02 | KIRREL2 | Pancreas | 3364 |
| KVRQVSPPA | HLA-A30:01 | KIRREL2 | Pancreas | 3365 |
| RSRPAQLHV | HLA-A30:01 | KIRREL2 | Pancreas | 3366 |
| KVRGVSVSL | HLA-A30:01 | KIRREL2 | Pancreas | 6367 |
| RMRVPALLV | HLA-A30:01 | KIRREL2 | Pancreas | 3368 |
| ATFHQTLLK | HLA-A30:01 | KIRREL2 | Pancreas | 3369 |
| ETKDPTNGY | HLA-A30:01 | KIRREL2 | Pancreas | 3370 |
| MVPPCRLYR | HLA-A33:03 | KIRREL2 | Pancreas | 3371 |
| FSRSFNCSAR | HLA-A33:03 | KIRREL2 | Pancreas | 3372 |
| DASFSCAWR | HLA-A33:03 | KIRREL2 | Pancreas | 3373 |
| CFRGRAGWSR | HLA-A33:03 | KIRREL2 | Pancreas | 3374 |
| ETFPAPESR | HLA-A33:03 | KIRREL2 | Pancreas | 3375 |
| EVSNAVGSANR | HLA-A33:03 | KIRREL2 | Pancreas | 3376 |
| SFNCSARNR | HLA-A33:03 | KIRREL2 | Pancreas | 3377 |
| EDAGDYVCR | HLA-A33:03 | KIRREL2 | Pancreas | 3378 |
| APAFLRGPA | HLA-B07:02 | KIRREL2 | Pancreas | 3379 |
| HPRAFTSYI | HLA-B07:02 | KIRREL2 | Pancreas | 3380 |
| FPAPESRGGL | HLA-B07:02 | KIRREL2 | Pancreas | 3381 |
| APAFLRGPARL | HLA-B07:02 | KIRREL2 | Pancreas | 3382 |
| SPLGPPGTPTF | HLA-B07:02 | KIRREL2 | Pancreas | 3383 |
| SPDSRVTSF | HLA-B07:02 | KIRREL2 | Pancreas | 3384 |
| APQVLGGPSV | HLA-B07:02 | KIRREL2 | Pancreas | 3385 |
| VPPEAPQVL | HLA-B07:02 | KIRREL2 | Pancreas | 3386 |
| MLRMRVPAL | HLA-B08:01 | KIRREL2 | Pancreas | 3387 |
| MLRMRVPALL | HLA-B08:01 | KIRREL2 | Pancreas | 3388 |
| MLRMRVPALLVL | HLA-B08:01 | KIRREL2 | Pancreas | 3389 |
| FVCRARSQAL | HLA-B08:01 | KIRREL2 | Pancreas | 3390 |
| DLHIRPVEL | HLA-B08:01 | KIRREL2 | Pancreas | 3391 |
| YYKVRGVSV | HLA-B08:01 | KIRREL2 | Pancreas | 3392 |
| TSYIKPTSF | HLA-B08:01 | KIRREL2 | Pancreas | 3393 |
| YDFNPHLGMV | HLA-B13:02 | KIRREL2 | Pancreas | 3394 |
| RDLLPTVRI | HLA-B13:02 | KIRREL2 | Pancreas | 3395 |
| ADASFLTEPV | HLA-B13:02 | KIRREL2 | Pancreas | 3396 |
| RDLLPTVRIV | HLA-B13:02 | KIRREL2 | Pancreas | 3397 |
| CQATAQPPV | HLA-B13:02 | KIRREL2 | Pancreas | 3398 |
| GQHDLHIRP | HLA-B13:02 | KIRREL2 | Pancreas | 3399 |
| GQHDLHIRPV | HLA-B13:02 | KIRREL2 | Pancreas | 3400 |
| GLISVLHI | HLA-B13:02 | KIRREL2 | Pancreas | 3401 |
| LQYPPEVTL | HLA-B13:02 | KIRREL2 | Pancreas | 3402 |
| FSHDDGATF | HLA-B46:01 | KIRREL2 | Pancreas | 3403 |
| FASPAPDAV | HLA-B46:01 | KIRREL2 | Pancreas | 3404 |
| FTSYIKPTSF | HLA-B46:01 | KIRREL2 | Pancreas | 3405 |
| AAATTTLLM | HLA-B46:01 | KIRREL2 | Pancreas | 3406 |
| TSYIKPTSF | HLA-B46:01 | KIRREL2 | Pancreas | 3407 |
| TAQPPVTGY | HLA-B46:01 | KIRREL2 | Pancreas | 3408 |
| YAAFPTPSH | HLA-B46:01 | KIRREL2 | Pancreas | 3409 |
| VAAATTTLL | HLA-C01:02 | KIRREL2 | Pancreas | 3410 |
| FLPPPSPL | HLA-C01:02 | KIRREL2 | Pancreas | 3411 |
| RVPALLVLL | HLA-C01:02 | KIRREL2 | Pancreas | 3412 |
| NAPPVVTAL | HLA-C01:02 | KIRREL2 | Pancreas | 3413 |
| EAPGQGLFL | HLA-C01:02 | KIRREL2 | Pancreas | 3414 |
| RGPARLQCL | HLA-C01:02 | KIRREL2 | Pancreas | 3415 |
| VAAATTTLL | HLA-C03:04 | KIRREL2 | Pancreas | 3416 |
| FASPAPDAV | HLA-C03:04 | KIRREL2 | Pancreas | 3417 |
| FSHDDGATF | HLA-C03:04 | KIRREL2 | Pancreas | 3418 |
| AAATTTLLM | HLA-C03:04 | KIRREL2 | Pancreas | 3419 |
| NAPPVVTAL | HLA-C03:04 | KIRREL2 | Pancreas | 3420 |
| LQYPPEVTL | HLA-C03:04 | KIRREL2 | Pancreas | 3421 |
| YAAFPTPSH | HLA-C03:04 | KIRREL2 | Pancreas | 3422 |
| FYDFNPHLGM | HLA-C04:01 | KIRREL2 | Pancreas | 3423 |
| SHDDGATFV | HLA-C04:01 | KIRREL2 | Pancreas | 3424 |
| FYDFNPHL | HLA-C04:01 | KIRREL2 | Pancreas | 3425 |
| FYDFNPHLG | HLA-C04:01 | KIRREL2 | Pancreas | 3426 |
| QYPPEVTL | HLA-C04:01 | KIRREL2 | Pancreas | 3427 |
| LRMRVPALL | HLA-C07:01 | KIRREL2 | Pancreas | 3428 |
| MRVPALLVL | HLA-C07:01 | KIRREL2 | Pancreas | 3429 |
| MLRMRVPALL | HLA-C07:01 | KIRREL2 | Pancreas | 3430 |
| TRRGGAQVL | HLA-C07:01 | KIRREL2 | Pancreas | 3431 |
| RRGGAQVL | HLA-C07:01 | KIRREL2 | Pancreas | 3432 |
| DRGPIVHTD | HLA-C07:01 | KIRREL2 | Pancreas | 3433 |
| SRPAQLHVL | HLA-C07:01 | KIRREL2 | Pancreas | 3434 |
| LRMRVPALL | HLA-C07:02 | KIRREL2 | Pancreas | 3435 |
| MRVPALLVL | HLA-C07:02 | KIRREL2 | Pancreas | 3436 |
| SRPAQLHVL | HLA-C07:02 | KIRREL2 | Pancreas | 3437 |
| LYRARAGYL | HLA-C07:02 | KIRREL2 | Pancreas | 3438 |
| QYPPEVTL | HLA-C07:02 | KIRREL2 | Pancreas | 3439 |
| NAPPVVTAL | HLA-C07:02 | KIRREL2 | Pancreas | 3440 |
| LSNDMCARAY | HLA-A01:01 | KLK2 | Prostate | 3441 |
| HSQPWQVAVY | HLA-A01:01 | KLK2 | Prostate | 3442 |
| YSEKVTEFM | HLA-A01:01 | KLK2 | Prostate | 3443 |
| STCLLGTCY | HLA-A01:01 | KLK2 | Prostate | 3444 |
| LSTCLLGTCY | HLA-A01:01 | KLK2 | Prostate | 3445 |
| DTCGVSHPY | HLA-A01:01 | KLK2 | Prostate | 3446 |
| LLSNDMCARAY | HLA-A01:01 | KLK2 | Prostate | 3447 |
| HLLSNDMCARAY | HLA-A01:01 | KLK2 | Prostate | 3448 |
| SNDMCARAY | HLA-A01:01 | KLK2 | Prostate | 3449 |
| ITDVVKVLG | HLA-A01:01 | KLK2 | Prostate | 3450 |
| YSEKVTEF | HLA-A01:01 | KLK2 | Prostate | 3451 |
| ITDVVKVLGL | HLA-A01:01 | KLK2 | Prostate | 3452 |
| YSEKVTEFMLC | HLA-A01:01 | KLK2 | Prostate | 3453 |
| YSEKVTEFML | HLA-A01:01 | KLK2 | Prostate | 3454 |
| ITDVVKVL | HLA-A01:01 | KLK2 | Prostate | 3455 |
| SLQCVSLHL | HLA-A02:01 | KLK2 | Prostate | 3456 |
| LVLSIALSV | HLA-A02:01 | KLK2 | Prostate | 3457 |
| VILGVHLSV | HLA-A02:01 | KLK2 | Prostate | 3458 |
| VLAPQESSV | HLA-A02:01 | KLK2 | Prostate | 3459 |
| FMLCAGLWTG | HLA-A02:01 | KLK2 | Prostate | 3460 |
| ILGVHLSVMV | HLA-A02:01 | KLK2 | Prostate | 3461 |
| SLLCTPRWCI | HLA-A02:01 | KLK2 | Prostate | 3462 |
| FMLCAGLWT | HLA-A02:01 | KLK2 | Prostate | 3463 |
| SLQCVSLHLL | HLA-A02:01 | KLK2 | Prostate | 3464 |
| VLSTCLLGTCYV | HLA-A02:01 | KLK2 | Prostate | 3465 |
| HLSVMVCFKV | HLA-A02:01 | KLK2 | Prostate | 3466 |
| LLGTCYVTSI | HLA-A02:01 | KLK2 | Prostate | 3467 |
| GLWTGGKDTCGV | HLA-A02:01 | KLK2 | Prostate | 3468 |
| MWDLVLSI | HLA-A02:01 | KLK2 | Prostate | 3469 |
| FLRPRSLQCV | HLA-A02:01 | KLK2 | Prostate | 3470 |
| RVILGVHLSV | HLA-A02:01 | KLK2 | Prostate | 3471 |
| ALSVGCTGI | HLA-A02:01 | KLK2 | Prostate | 3472 |
| RSLQCVSLHL | HLA-A02:01 | KLK2 | Prostate | 3473 |
| ALSVQCTGAV | HLA-A02:01 | KLK2 | Prostate | 3474 |
| CLLGTCYV | HLA-A02:01 | KLK2 | Prostate | 3475 |
| VLSTCLLGT | HLA-A02:01 | KLK2 | Prostate | 3476 |
| LLSNDMCARA | HLA-A02:01 | KLK2 | Prostate | 3477 |
| WLRVILGVHLSV | HLA-A02:01 | KLK2 | Prostate | 3478 |
| KVTEFMLCA | HLA-A02:01 | KLK2 | Prostate | 3479 |
| CLLGTCYVT | HLA-A02:01 | KLK2 | Prostate | 3480 |
| SVCEPPSPV | HLA-A02:01 | KLK2 | Prostate | 3481 |
| MLCAGLWTG | HLA-A02:01 | KLK2 | Prostate | 3482 |
| DLVLSIALSV | HLA-A02:01 | KLK2 | Prostate | 3483 |
| LLGTCYVTSIAV | HLA-A02:01 | KLK2 | Prostate | 3484 |
| GLPTQEPAL | HLA-A02:01 | KLK2 | Prostate | 3485 |
| ALPEKPAV | HLA-A02:01 | KLK2 | Prostate | 3486 |
| RLSEPAKITDV | HLA-A02:01 | KLK2 | Prostate | 3487 |
| AKITDVVKV | HLA-A02:01 | KLK2 | Prostate | 3488 |
| ALPEKPAVYT | HLA-A02:01 | KLK2 | Prostate | 3489 |
| KITDVVKV | HLA-A02:01 | KLK2 | Prostate | 3490 |
| KITDVVKVL | HLA-A02:01 | KLK2 | Prostate | 3491 |
| ALPEKPAVY | HLA-A02:01 | KLK2 | Prostate | 3492 |
| AWLRVILGV | HLA-A02:01 | KLK2 | Prostate | 3493 |
| STGDHLLRL | HLA-A02:01 | KLK2 | Prostate | 3494 |
| HLLSNDMCA | HLA-A02:01 | KLK2 | Prostate | 3495 |
| SLLKHQSL | HLA-A02:01 | KLK2 | Prostate | 3496 |
| ALSVGCTGA | HLA-A02:01 | KLK2 | Prostate | 3497 |
| RLSEPAKI | HLA-A02:01 | KLK2 | Prostate | 3498 |
| ALSHVPCL | HLA-A02:01 | KLK2 | Prostate | 3499 |
| FLRPRSL?C | HLA-A02:01 | KLK2 | Prostate | 3500 |
| NLFEPEDTG | HLA-A02:01 | KLK2 | Prostate | 3501 |
| HPLYNMSLLK | HLA-A03:01 | KLK2 | Prostate | 3502 |
| ALSHVPCLK | HLA-A03:01 | KLK2 | Prostate | 3503 |
| PLYNMSLLK | HLA-A03:01 | KLK2 | Prostate | 3504 |
| FPHPLYNMSLLK | HLA-A03:01 | KLK2 | Prostate | 3505 |
| HLSVMVCFK | HLA-A03:01 | KLK2 | Prostate | 3506 |
| PHPLYNMSLLK | HLA-A03:01 | KLK2 | Prostate | 3507 |
| VHLSVMVCFK | HLA-A03:01 | KLK2 | Prostate | 3508 |
| MLLRLSEPAK | HLA-A03:01 | KLK2 | Prostate | 3509 |
| GALSHVPCLK | HLA-A03:01 | KLK2 | Prostate | 3510 |
| AVYTKVVHY | HLA-A03:01 | KLK2 | Prostate | 3511 |
| AVYSHGWAH | HLA-A03:01 | KLK2 | Prostate | 3512 |
| AVYTKVVHYR | HLA-A03:01 | KLK2 | Prostate | 3513 |
| ALPEKPAVY | HLA-A03:01 | KLK2 | Prostate | 3514 |
| AVYTKVVHYRK | HLA-A03:01 | KLK2 | Prostate | 3515 |
| AVDGAGQKK | HLA-A03:01 | KLK2 | Prostate | 3516 |
| HPLYNMSLLK | HLA-A11:01 | KLK2 | Prostate | 3517 |
| AVYTKVVHYR | HLA-A11:01 | KLK2 | Prostate | 3518 |
| ALSHVPCLK | HLA-A11:01 | KLK2 | Prostate | 3519 |
| HLSVMVCFK | HLA-A11:01 | KLK2 | Prostate | 3520 |
| GALSHVPCLK | HLA-A11:01 | KLK2 | Prostate | 3521 |
| PLYNMSLLK | HLA-A11:01 | KLK2 | Prostate | 3522 |
| AVYTKVVHY | HLA-A11:01 | KLK2 | Prostate | 3523 |
| VHLSVMVCFK | HLA-A11:01 | KLK2 | Prostate | 3524 |
| VTSIAVDPGK | HLA-A11:01 | KLK2 | Prostate | 3525 |
| AVYTKVVHYRK | HLA-A11:01 | KLK2 | Prostate | 3526 |
| AVDGAGQKK | HLA-A11:01 | KLK2 | Prostate | 3527 |
| ASTGDHLLR | HLA-A11:01 | KLK2 | Prostate | 3528 |
| SVGCTGIAR | HLA-A11:01 | KLK2 | Prostate | 3529 |
| GSIEPEEFLR | HLA-A11:01 | KLK2 | Prostate | 3530 |
| AVYSHGWAH | HLA-A11:01 | KLK2 | Prostate | 3531 |
| SIEPEEFLR | HLA-ALI:01 | KLK2 | Prostate | 3532 |
| VWLGRHNLF | HLA-A24:02 | KLK2 | Prostate | 3533 |
| AYSEKVTEF | HLA-A24:02 | KLK2 | Prostate | 3534 |
| RAYSEKVTEF | HLA-A24:02 | KLK2 | Prostate | 3535 |
| QVWLGRHNLF | HLA-A24:02 | KLK2 | Prostate | 3536 |
| SFPHPLYNM | HLA-A24:02 | KLK2 | Prostate | 3537 |
| EFMLCAGLW | HLA-A24:02 | KLK2 | Prostate | 3538 |
| TEFMLCAGLW | HLA-A24:02 | KLK2 | Prostate | 3539 |
| VYTKVVHYRKWI | HLA-A24:02 | KLK2 | Prostate | 3540 |
| VYTKVVHYRKW | HLA-A24:02 | KLK2 | Prostate | 3541 |
| VYTKVVHYR | HLA-A24:02 | KLK2 | Prostate | 3542 |
| VYSHGWAHC | HLA-A24:02 | KLK2 | Prostate | 3543 |
| QRVPVSHSF | HLA-A24:02 | KLK2 | Prostate | 3544 |
| SWGPEPCAL | HLA-A24:02 | KLK2 | Prostate | 3545 |
| VHLSVMVCF | HLA-A24:02 | KLK2 | Prostate | 3546 |
| RTRQVLAPQ | HLA-A30:01 | KLK2 | Prostate | 3547 |
| KTQARGSLS | HLA-A30:01 | KLK2 | Prostate | 3548 |
| KTQARGSLSA | HLA-A30:01 | KLK2 | Prostate | 3549 |
| RTRGVLAPQE | HLA-A30:01 | KLK2 | Prostate | 3550 |
| RTRGVLAPQESS | HLA-A30:01 | KLK2 | Prostate | 3551 |
| RTRGVLAPQES | HLA-A30:01 | KLK2 | Prostate | 3552 |
| RTRGVLAP | HLA-A30:01 | KLK2 | Prostate | 3553 |
| LLRLSEPAK | HLA-A30:01 | KLK2 | Prostate | 3554 |
| GSRTPSQPT | HLA-A30:01 | KLK2 | Prostate | 3555 |
| AVYTKVVHY | HLA-A30:01 | KLK2 | Prostate | 3556 |
| KITDVVKVL | HLA-A30:01 | KLK2 | Prostate | 3557 |
| AVDGAGQKK | HLA-A30:01 | KLK2 | Prostate | 3558 |
| LVLSIALSV | HLA-A30:01 | KLK2 | Prostate | 3559 |
| SVCEPPSPV | HLA-A30:01 | KLK2 | Prostate | 3560 |
| RVILGVHLSV | HLA-A30:01 | KLK2 | Prostate | 3561 |
| VILGVHLSV | HLA-A30:01 | KLK2 | Prostate | 3562 |
| TSIAVDPGK | HLA-A30:01 | KLK2 | Prostate | 3563 |
| VYTKVVHYR | HLA-A33:03 | KLK2 | Prostate | 3564 |
| MSLLKHQSLR | HLA-A33:03 | KLK2 | Prostate | 3565 |
| AVYTKVVHYR | HLA-A33:03 | KLK2 | Prostate | 3566 |
| CLKSLLCTPR | HLA-A33:03 | KLK2 | Prostate | 3567 |
| SLLKHQSLR | HLA-A33:03 | KLK2 | Prostate | 3568 |
| LSATASHTR | HLA-A33:03 | KLK2 | Prostate | 3569 |
| INMSLLKHQSLR | HLA-A33:03 | KLK2 | Prostate | 3570 |
| SVGCTGIAR | HLA-A33:03 | KLK2 | Prostate | 3571 |
| YNMSLLKHQSLR | HLA-A33:03 | KLK2 | Prostate | 3572 |
| EPEEFLRPR | HLA-A33:03 | KLK2 | Prostate | 3573 |
| GAVPLIQSR | HLA-A33:03 | KLK2 | Prostate | 3574 |
| STGDHLLRLR | HLA-A33:03 | KLK2 | Prostate | 3575 |
| SIEPEEFLR | HLA-A33:03 | KLK2 | Prostate | 3576 |
| TGDHLLRLR | HLA-A33:03 | KLK2 | Prostate | 3577 |
| RPRSLQCVSL | HLA-B07:02 | KLK2 | Prostate | 3578 |
| RPRSLQCVSLHL | HLA-B07:02 | KLK2 | Prostate | 3579 |
| FPHPLYNMSI | HLA-B07:02 | KLK2 | Prostate | 3580 |
| KPAVYTKVV | HLA-B07:02 | KLK2 | Prostate | 3581 |
| SPIPVLSTCL | HLA-B07:02 | KLK2 | Prostate | 3582 |
| HPLYNMSLL | HLA-B07:02 | KLK2 | Prostate | 3583 |
| HPQWVLTAAHCL | HLA-B07:02 | KLK2 | Prostate | 3584 |
| LRPRSLQCVSL | HLA-B07:02 | KLK2 | Prostate | 3585 |
| RPRSLQCVS | HLA-B07:02 | KLK2 | Prostate | 3586 |
| SPIPVLSTC | HLA-B07:02 | KLK2 | Prostate | 3587 |
| IPVLSTCLL | HLA-B07:02 | KLK2 | Prostate | 3588 |
| SPIPVLSTCLL | HLA-B07:02 | KLK2 | Prostate | 3589 |
| GPAHPGAST | HLA-B07:02 | KLK2 | Prostate | 3590 |
| TPSQPTPEC | HLA-B07:02 | KLK2 | Prostate | 3591 |
| FLRPRSLQCVSL | HLA-B08:01 | KLK2 | Prostate | 3592 |
| MSLLKHQSL | HLA-B08:01 | KLK2 | Prostate | 3593 |
| NMSLLKHQSL | HLA-B08:01 | KLK2 | Prostate | 3594 |
| FLRPRSLQCV | HLA-B08:01 | KLK2 | Prostate | 3595 |
| FLRPRSLQC | HLA-B08:01 | KLK2 | Prostate | 3596 |
| SLLKHQSL | HLA-B08:01 | KLK2 | Prostate | 3597 |
| FPHPLYNMSL | HLA-B08:01 | KLK2 | Prostate | 3598 |
| ILGVHLSVM | HLA-B08:01 | KLK2 | Prostate | 3599 |
| YNMSLLKHQSL | HLA-B08:01 | KLK2 | Prostate | 3600 |
| CFKVSHHGAL | HLA-B08:01 | KLK2 | Prostate | 3601 |
| EEFLRPRSL | HLA-B08:01 | KLK2 | Prostate | 3602 |
| DLVLSIAL | HLA-B08:01 | KLK2 | Prostate | 3603 |
| HPLYNMSL | HLA-B08:01 | KLK2 | Prostate | 3604 |
| VPCLKSLL | HLA-B08:01 | KLK2 | Prostate | 3605 |
| EPAKITDV | HLA-B08:01 | KLK2 | Prostate | 3606 |
| DVVKVLGL | HLA-B08:01 | KLK2 | Prostate | 3607 |
| HVPCLKSL | HLA-B08:01 | KLK2 | Prostate | 3608 |
| RAWLRVILGV | HLA-B13:02 | KLK2 | Prostate | 3609 |
| TEFMLCAGL | HLA-B13:02 | KLK2 | Prostate | 3610 |
| MWDLVLSIAL | HLA-B13:02 | KLK2 | Prostate | 3611 |
| TEFMLCAGLW | HLA-B13:02 | KLK2 | Prostate | 3612 |
| WDLVLSIAL | HLA-B13:02 | KLK2 | Prostate | 3613 |
| KDRAWLRVI | HLA-B13:02 | KLK2 | Prostate | 3614 |
| WAHCGGVLV | HLA-B13:02 | KLK2 | Prostate | 3615 |
| WDLVLSIALSV | HLA-B13:02 | KLK2 | Prostate | 3616 |
| LSVMVCFKV | HLA-B13:02 | KLK2 | Prostate | 3617 |
| AWLRVILGV | HLA-B13:02 | KLK2 | Prostate | 3618 |
| ALSVGCTGI | HLA-B13:02 | KLK2 | Prostate | 3619 |
| KITDVVKV | HLA-B13:02 | KLK2 | Prostate | 3620 |
| RLSEPAKI | HLA-B13:02 | KLK2 | Prostate | 3621 |
| GQHRTRGV | HLA-B13:02 | KLK2 | Prostate | 3622 |
| AKITDVVKV | HLA-B13:02 | KLK2 | Prostate | 3623 |
| VILGVHLSV | HLA-B13:02 | KLK2 | Prostate | 3624 |
| HSQPWQVAV | HLA-B13:02 | KLK2 | Prostate | 3625 |
| RAYSEKVTE | HLA-B13:02 | KLK2 | Prostate | 3626 |
| HSFPHPLYNM | HLA-B46:01 | KLK2 | Prostate | 3627 |
| HSQPWQVAVY | HLA-B46:01 | KLK2 | Prostate | 3628 |
| LSNDMCARAY | HLA-B46:01 | KLK2 | Prostate | 3629 |
| LSVGCTGAV | HLA-B46:01 | KLK2 | Prostate | 3630 |
| SQPWQVAVY | HLA-B46:01 | KLK2 | Prostate | 3631 |
| RAYSEKVTEF | HLA-B46:01 | KLK2 | Prostate | 3632 |
| WAHCGGVLV | HLA-B46:01 | KLK2 | Prostate | 3633 |
| YSEKVTEFM | HLA-B46:01 | KLK2 | Prostate | 3634 |
| LSTCLLGTCY | HLA-B46:01 | KLK2 | Prostate | 3635 |
| AVYTKVVHY | HLA-B46:01 | KLK2 | Prostate | 3636 |
| AVYSHGWAH | HLA-B46:01 | KLK2 | Prostate | 3637 |
| VSHPYSQHL | HLA-B46:01 | KLK2 | Prostate | 3638 |
| VSHHGALSH | HLA-B46:01 | KLK2 | Prostate | 3639 |
| ALPEKPAVY | HLA-B46:01 | KLK2 | Prostate | 3640 |
| VSHPYSQH | HLA-B46:01 | KLK2 | Prostate | 3641 |
| IARSGWVGT | HLA-B46:01 | KLK2 | Prostate | 3642 |
| HSQPWQVAV | HLA-B46:01 | KLK2 | Prostate | 3643 |
| MSLLKHQSL | HLA-C01:02 | KLK2 | Prostate | 3644 |
| VSHPYSQHL | HLA-C01:02 | KLK2 | Prostate | 3645 |
| FPHPLYNMSL | HLA-C01:02 | KLK2 | Prostate | 3646 |
| HVPCLKSLL | HLA-C01:02 | KLK2 | Prostate | 3647 |
| HSQPWQVAV | HLA-C01:02 | KLK2 | Prostate | 3648 |
| WVGTTCLSL | HLA-C01:02 | KLK2 | Prostate | 3649 |
| YSEKVTEFM | HLA-C01:02 | KLK2 | Prostate | 3650 |
| STGDHLLRL | HLA-C01:02 | KLK2 | Prostate | 3651 |
| ILGVHLSVM | HLA-C01:02 | KLK2 | Prostate | 3652 |
| WGPEPCAL | HLA-C01:02 | KLK2 | Prostate | 3653 |
| GLPTQEPAL | HLA-C01:02 | KLK2 | Prostate | 3654 |
| HVPCLKSL | HLA-C01:02 | KLK2 | Prostate | 3655 |
| ALPEKPAV | HLA-C01:02 | KLK2 | Prostate | 3656 |
| LAPQESSV | HLA-C01:02 | KLK2 | Prostate | 3657 |
| NSPIPVLST | HLA-C01:02 | KLK2 | Prostate | 3658 |
| ALPEKPAVY | HLA-C01:02 | KLK2 | Prostate | 3659 |
| PIPVLSTCL | HLA-C01:02 | KLK2 | Prostate | 3660 |
| MSLLKHQSL | HLA-C03:04 | KLK2 | Prostate | 3661 |
| LSVGCTGAV | HLA-C03:04 | KLK2 | Prostate | 3662 |
| WAHCGGVLV | HLA-C03:04 | KLK2 | Prostate | 3663 |
| VSHPYSQHL | HLA-C03:04 | KLK2 | Prostate | 3664 |
| HSQPWQVAV | HLA-C03:04 | KLK2 | Prostate | 3665 |
| TASHTRSTI | HLA-C03:04 | KLK2 | Prostate | 3666 |
| HSFPHPLYNM | HLA-C03:04 | KLK2 | Prostate | 3667 |
| FKVSHHGAL | HLA-C03:04 | KLK2 | Prostate | 3668 |
| GALSHVPCL | HLA-C03:04 | KLK2 | Prostate | 3669 |
| LAVDPGKQQ | HLA-C03:04 | KLK2 | Prostate | 3670 |
| KITDVVKVL | HLA-C03:04 | KLK2 | Prostate | 3671 |
| WAHCQGVL | HLA-C03:04 | KLK2 | Prostate | 3672 |
| LSHVPCLKSL | HLA-C03:04 | KLK2 | Prostate | 3673 |
| STGDHLLRL | HLA-C03:04 | KLK2 | Prostate | 3674 |
| SFPHPLYNM | HLA-C04:01 | KLK2 | Prostate | 3675 |
| YSEKVTEFM | HLA-C04:01 | KLK2 | Prostate | 3676 |
| MWDLVLSIAL | HLA-C04:01 | KLK2 | Prostate | 3677 |
| AYSEKVTEF | HLA-C04:01 | KLK2 | Prostate | 3678 |
| GHNSPIPVL | HLA-C04:01 | KLK2 | Prostate | 3679 |
| FPHPLYNMSL | HLA-C04:01 | KLK2 | Prostate | 3680 |
| SLQCVSLHL | HLA-C04:01 | KLK2 | Prostate | 3681 |
| HSQPWQVAV | HLA-C04:01 | KLK2 | Prostate | 3682 |
| HSFPHPLYNM | HLA-C04:01 | KLK2 | Prostate | 3683 |
| MWDLVLSI | HLA-C04:01 | KLK2 | Prostate | 3684 |
| ITDVVKVL | HLA-C04:01 | KLK2 | Prostate | 3685 |
| MWDLVLSIA | HLA-C04:01 | KLK2 | Prostate | 3686 |
| ITDVVKVLG | HLA-C04:01 | KLK2 | Prostate | 3687 |
| TGDHLLRL | HLA-C04:01 | KLK2 | Prostate | 3688 |
| SWGPEPCAL | HLA-C04:01 | KLK2 | Prostate | 3689 |
| HSFPHPLYNM | HLA-C07:01 | KLK2 | Prostate | 3690 |
| DRAWLRVIL | HLA-C07:01 | KLK2 | Prostate | 3691 |
| QRVPVSHSF | HLA-C07:01 | KLK2 | Prostate | 3692 |
| LRLSEPAKI | HLA-C07:01 | KLK2 | Prostate | 3693 |
| HSFPHPLYNMSL | HLA-C07:01 | KLK2 | Prostate | 3694 |
| HSQPWQVAV | HLA-C07:01 | KLK2 | Prostate | 3695 |
| VSHPYSQHL | HLA-C07:01 | KLK2 | Prostate | 3696 |
| KDRAWLRVIL | HLA-C07:01 | KLK2 | Prostate | 3697 |
| SHVPCLKSL | HLA-C07:01 | KLK2 | Prostate | 3698 |
| HNSPIPVL | HLA-C07:01 | KLK2 | Prostate | 3699 |
| HSQPWQVAVY | HLA-C07:01 | KLK2 | Prostate | 3700 |
| HSFPHPLYN | HLA-C07:01 | KLK2 | Prostate | 3701 |
| SWGPEPCAL | HLA-C07:01 | KLK2 | Prostate | 3702 |
| RSGWVGTTC | HLA-C07:01 | KLK2 | Prostate | 3703 |
| KITDVVKVL | HLA-C07:01 | KLK2 | Prostate | 3704 |
| ARSGWVGTT | HLA-C07:01 | KLK2 | Prostate | 3705 |
| AYSEKVTEF | HLA-C07:02 | KLK2 | Prostate | 3706 |
| HSFPHPLYNM | HLA-C07:02 | KLK2 | Prostate | 3707 |
| SFPHPLYNM | HLA-C07:02 | KLK2 | Prostate | 3708 |
| QRVPVSHSF | HLA-C07:02 | KLK2 | Prostate | 3709 |
| SHVPCLKSI | HLA-C07:02 | KLK2 | Prostate | 3710 |
| VWLGRHNLF | HLA-C07:02 | KLK2 | Prostate | 3711 |
| FPHPLYNMSL | HLA-C07:02 | KLK2 | Prostate | 3712 |
| LRPRSLQCV | HLA-C07:02 | KLK2 | Prostate | 3713 |
| VSHPYSQHL | HLA-C07:02 | KLK2 | Prostate | 3714 |
| FKVSHHGAL | HLA-C07:02 | KLK2 | Prostate | 3715 |
| VYTKVVHY | HLA-C07:02 | KLK2 | Prostate | 3716 |
| ALPEKPAVY | HLA-C07:02 | KLK2 | Prostate | 3717 |
| LRVILGVHL | HLA-C07:02 | KLK2 | Prostate | 3718 |
| LRPDEDSSH | HLA-C07:02 | KLK2 | Prostate | 3719 |
| KITDVVKVL | HLA-C07:02 | KLK2 | Prostate | 3720 |
| HNSPIPVL | HLA-C07:02 | KLK2 | Prostate | 3721 |
| STCSVSHPY | HLA-A01:01 | KLK3 | Prostate | 3722 |
| VSHSFPHPLY | HLA-A01:01 | KLK2; KLK3 | Prostate | 3723 |
| KSTCSVSHPY | HLA-A01:01 | KLK3 | Prostate | 3724 |
| IAQPAPCSQLLY | HLA-A01:01 | KLK3 | Prostate | 3725 |
| LTDAVKVMDL | HLA-A01:01 | KLK3 | Prostate | 3726 |
| CALPERPSLY | HLA-A01:01 | KLK3 | Prostate | 3727 |
| CSGDSGGPLV | HLA-A01:01 | KLK3 | Prostate | 3728 |
| SSHDLMLLRL | HLA-A01:01 | KLK2; KLK3 | Prostate | 3729 |
| QPAPCSQLLY | HLA-A01:01 | KLK3 | Prostate | 3730 |
| LSEPAELT | HLA-A01:01 | KLK3 | Prostate | 3731 |
| ALPERPSLY | HLA-A01:01 | KLK3 | Prostate | 3732 |
| LPERPSLY | HLA-A01:01 | KLK3 | Prostate | 3733 |
| LSEPAELTD | HLA-A01:01 | KLK3 | Prostate | 3734 |
| LTDAVKVMD | HLA-A01:01 | KLK3 | Prostate | 3735 |
| HSFPHPLY | HLA-A01:01 | KLK2; KLK3 | Prostate | 3736 |
| LTDAVKVM | HLA-A01:01 | KLK3 | Prostate | 3737 |
| LTMPALPMV | HLA-A02:01 | KLK3 | Prostate | 3738 |
| FLTLSVTWIA | HLA-A02:01 | KLK3 | Prostate | 3739 |
| KLQCVDLHV | HLA-A02:01 | KLK3 | Prostate | 3740 |
| ILITELTMPA | HLA-A02:01 | KLK3 | Prostate | 3741 |
| FLTLSVTWI | HLA-A02:01 | KLK3 | Prostate | 3742 |
| FLTLAVCGGV | HLA-A02:01 | KLK3 | Prostate | 3743 |
| MLLRLSEPA | HLA-A02:01 | KLK2; KLK3 | Prostate | 3744 |
| ELTMPALPMV | HLA-A02:01 | KLK3 | Prostate | 3745 |
| FLSLPAPLQA | HLA-A02:01 | KLK3 | Prostate | 3746 |
| WIAPPLQVLV | HLA-A02:01 | KLK3 | Prostate | 3747 |
| KKLQCVDLHV | HLA-A02:01 | KLK3 | Prostate | 3748 |
| FLTPKKLQCV | HLA-A02:01 | KLK3 | Prostate | 3749 |
| LITELTMPA | HLA-A02:01 | KLK3 | Prostate | 3750 |
| FLSLPAPL | HLA-A02:01 | KLK3 | Prostate | 3751 |
| LMLLRLSEPA | HLA-A02:01 | KLK2; KLK3 | Prostate | 3752 |
| HLPQNFLPI | HLA-A02:01 | KLK3 | Prostate | 3753 |
| KLQCVDLHVI | HLA-A02:01 | KLK3 | Prostate | 3754 |
| SLVPWRGGV | HLA-A02:01 | KLK3 | Prostate | 3755 |
| LITELTMPAL | HLA-A02:01 | KLK3 | Prostate | 3756 |
| VLVHPQWVL | HLA-A02:01 | KLK2; | Prostate | 3757 |
| | | KLK3; KLK4 | | |
| LTLAVCGGV | HLA-A02:01 | KLK3 | Prostate | 3758 |
| FLTLAVCGGVLV | HLA-A02:01 | KLK3 | Prostate | 3759 |
| FLPIAQPA | HLA-A02:01 | KLK3 | Prostate | 3760 |
| VFLTLSVTWIA | HLA-A02:01 | KLK3 | Prostate | 3761 |
| LLRLSEPAEL | HLA-A02:01 | KLK3 | Prostate | 3762 |
| TLAVCGGVLV | HLA-A02:01 | KLK3 | Prostate | 3763 |
| VISNDVCAQV | HLA-A02:01 | KLK3 | Prostate | 3764 |
| FMLCAGRWT | HLA-A02:01 | KLK3 | Prostate | 3765 |
| ILITELTMPAL | HLA-A02:01 | KLK3 | Prostate | 3766 |
| FLRPGDDSTL | HLA-A02:01 | KLK3 | Prostate | 3767 |
| RLSEPAEL | HLA-A02:01 | KLK3 | Prostate | 3768 |
| VLTPKKLQCV | HLA-A02:01 | KLK3 | Prostate | 3769 |
| SLYTKVVHY | HLA-A02:01 | KLK3 | Prostate | 3770 |
| ALPERPSL | HLA-A02:01 | KLK3 | Prostate | 3771 |
| ILLGRHSL | HLA-A02:01 | KLK3 | Prostate | 3772 |
| FLTPKKLQC | HLA-A02:01 | KLK3 | Prostate | 3773 |
| SGDSGGPLV | HLA-A02:01 | KLK3 | Prostate | 3774 |
| SLFHPEDTGQV | HLA-A02:01 | KLK3 | Prostate | 3775 |
| RLSEPAELT | HLA-A02:01 | KLK3 | Prostate | 3776 |
| VLHGSLVPW | HLA-A02:01 | KLK3 | Prostate | 3777 |
| GVLVHPQWV | HLA-A02:01 | KLK2; | Prostate | 3778 |
| | | KLK3; KLK4 | | |
| WIAPPLQVL | HLA-A02:01 | KLK3 | Prostate | 3779 |
| TLSVTWIGA | HLA-A02:01 | KLK3 | Prostate | 3780 |
| ELTDAVKV | HLA-A02:01 | KLK3 | Prostate | 3781 |
| FLRPGDDST | HLA-A02:01 | KLK3 | Prostate | 3782 |
| FHPEDTGQV | HLA-A02:01 | KLK3 | Prostate | 3783 |
| TWIAPPLQV | HLA-A02:01 | KLK3 | Prostate | 3784 |
| HPLYDMSLLK | HLA-A03:01 | KLK3 | Prostate | 3785 |
| PLYDMSLLK | HLA-A03:01 | KLK3 | Prostate | 3786 |
| VLTAAHCIRK | HLA-A03:01 | KLK3 | Prostate | 3787 |
| LTAAHCIRK | HLA-A03:01 | KLK3 | Prostate | 3788 |
| SLYTKVVHYRK | HLA-A03:01 | KLK3 | Prostate | 3789 |
| FPHPLYDMSLLK | HLA-A03:01 | KLK3 | Prostate | 3790 |
| SLYTKVVHY | HLA-A03:01 | KLK3 | Prostate | 3791 |
| SLYTKVVHYR | HLA-A03:01 | KLK3 | Prostate | 3792 |
| PHPLYDMSLLK | HLA-A03:01 | KLK3 | Prostate | 3793 |
| KVVHYRKWIK | HLA-A03:01 | KLK2; KLK3 | Prostate | 3794 |
| SIEPEEFLTPK | HLA-A03:01 | KLK3 | Prostate | 3795 |
| ALPERPSLY | HLA-A03:01 | KLK3 | Prostate | 3796 |
| WVLTAAHCIRK | HLA-A03:01 | KLK3 | Prostate | 3797 |
| AVCGGVLVH | HLA-A03:01 | KLK3 | Prostate | 3798 |
| ALPERPSLYTK | HLA-A03:01 | KLK3 | Prostate | 3799 |
| LTAAHCIRK | HLA-A11:01 | KLK3 | Prostate | 3800 |
| HPLYDMSLLK | HLA-A11:01 | KLK3 | Prostate | 3801 |
| STCSVSHPY | HLA-A11:01 | KLK3 | Prostate | 3802 |
| GSIEPEEFLTPK | HLA-A11:01 | KLK3 | Prostate | 3803 |
| SSHDLMLLR | HLA-A11:01 | KLK2; KLK3 | Prostate | 3804 |
| LTAAHCIRNK | HLA-A11:01 | KLK3 | Prostate | 3805 |
| VLTAAHCIRK | HLA-A11:01 | KLK3 | Prostate | 3806 |
| PLYDMSLLK | HLA-A11:01 | KLK3 | Prostate | 3807 |
| SLYTKVVHYR | HLA-A11:01 | KLK3 | Prostate | 3808 |
| GAAPLILSR | HLA-A11:01 | KLK3 | Prostate | 3809 |
| AVCGGVLVH | HLA-A11:01 | KLK3 | Prostate | 3810 |
| GVLQGITSW | HLA-A11:01 | KLK2; KLK3 | Prostate | 3811 |
| STCSWVILI | HLA-A11:01 | KLK3 | Prostate | 3812 |
| RIVGGWECEK | HLA-A11:01 | KLK2; KLK3 | Prostate | 3813 |
| WVLTAAHCIRK | HLA-A11:01 | KLK3 | Prostate | 3814 |
| QVHPQKVTK | HLA-A11:01 | KLK3 | Prostate | 3815 |
| CYASGWGSI | HLA-A24:02 | KLK2; KLK3 | Prostate | 3816 |
| TWIGAAPLI | HLA-A24:02 | KLK3 | Prostate | 3817 |
| VFLTLSVTW | HLA-A24:02 | KLK3 | Prostate | 3818 |
| MWVPVVFLTL | HLA-A24:02 | KLK3 | Prostate | 3819 |
| KFMLCAGRW | HLA-A24:02 | KLK3 | Prostate | 3820 |
| VVFLTLSVTW | HLA-A24:02 | KLK3 | Prostate | 3821 |
| HYRKWIKDTI | HLA-A24:02 | KLK2; KLK3 | Prostate | 3822 |
| VTWIGAAPLI | HLA-A24:02 | KLK3 | Prostate | 3823 |
| TCYASGWGSI | HLA-A24:02 | KLK2; KLK3 | Prostate | 3824 |
| ILLGRHSLF | HLA-A24:02 | KLK3 | Prostate | 3825 |
| VHPQKVTKF | HLA-A24:02 | KLK3 | Prostate | 3826 |
| LFHPEDTGQVF | HLA-A24:02 | KLK3 | Prostate | 3827 |
| VFQVSHSF | HLA-A24:02 | KLK3 | Prostate | 3828 |
| GWGSIEPEEF | HLA-A24:02 | KLK2; KLK3 | Prostate | 3829 |
| FHPEDIGQVF | HLA-A24:02 | KLK3 | Prostate | 3830 |
| YTKVVHYRK | HLA-A30:01 | KLK2; KLK3 | Prostate | 3831 |
| RGRAVCGGV | HLA-A30:01 | KLK3 | Prostate | 3832 |
| VVHYRKWIK | HLA-A30:01 | KLK2; KLK3 | Prostate | 3833 |
| QVHPQKVTK | HLA-A30:01 | KLK3 | Prostate | 3834 |
| KVVHYRKWIK | HLA-A30:01 | KLK2; KLK3 | Prostate | 3835 |
| KVTKFMLCAG | HLA-A30:01 | KLK3 | Prostate | 3836 |
| SSLPHQVPA | HLA-A30:01 | KLK3 | Prostate | 3837 |
| LTMPALPMV | HLA-A30:01 | KLK3 | Prostate | 3838 |
| LTAAHCIRK | HLA-A30:01 | KLK3 | Prostate | 3839 |
| ALPERPSLYTK | HLA-A30:01 | KLK3 | Prostate | 3840 |
| SLYTKVVHY | HLA-A30:01 | KLK3 | Prostate | 3841 |
| VCAQVHPQK | HLA-A30:01 | KLK3 | Prostate | 3842 |
| HSQPWQVLV | HLA-A30:01 | KLK3 | Prostate | 3843 |
| HSFPHPLY | HLA-A30:01 | KLK2; KLK3 | Prostate | 3844 |
| HSFPHPLYD | HLA-A30:01 | KLK3 | Prostate | 3845 |
| LTAAHCIRNK | HLA-A30:01 | KLK3 | Prostate | 3846 |
| SVTWIAPPL | HLA-A30:01 | KLK3 | Prostate | 3847 |
| MSLLKNRFLR | HLA-A33:03 | KLK3 | Prostate | 3848 |
| LYTKVVHYR | HLA-A33:03 | KLK3 | Prostate | 3849 |
| YTKVVHYR | HLA-A33:03 | KLK2; KLK3 | Prostate | 3850 |
| SLYTKVVHYR | HLA-A33:03 | KLK3 | Prostate | 3851 |
| SLLKNRFLR | HLA-A33:03 | KLK3 | Prostate | 3852 |
| VTKFMLCAGR | HLA-A33:03 | KLK3 | Prostate | 3853 |
| YTKVVHYRK | HLA-A33:03 | KLK2; KLK3 | Prostate | 3854 |
| DMSLLKNRFLR | HLA-A33:03 | KLK3 | Prostate | 3855 |
| SSHDLMLLR | HLA-A33:03 | KLK2; KLK3 | Prostate | 3856 |
| YDMSLLKNR | HLA-A33:03 | KLK3 | Prostate | 3857 |
| EALSPPTQH | HLA-A33:03 | KLK3 | Prostate | 3858 |
| GAAPLILSR | HLA-A33:03 | KLK3 | Prostate | 3859 |
| QVLVASRQR | HLA-A33:03 | KLK3 | Prostate | 3860 |
| LPMVLHGSL | HLA-B07:02 | KLK3 | Prostate | 3861 |
| ALPMVLHGSL | HLA-B07:02 | KLK3 | Prostate | 3862 |
| SPDRELGSFL | HLA-B07:02 | KLK3 | Prostate | 3863 |
| MPALPMVLHGSL | HLA-B07:02 | KLK3 | Prostate | 3864 |
| RPSLYTKVV | HLA-B07:02 | KLK3 | Prostate | 3865 |
| LPMVLHGSLV | HLA-B07:02 | KLK3 | Prostate | 3866 |
| SPSILQQSSL | HLA-B07:02 | KLK3 | Prostate | 3867 |
| FPHPLYDMSL | HLA-B07:02 | KLK3 | Prostate | 3868 |
| GPLVCNGVL | HLA-B07:02 | KLK2; KLK3 | Prostate | 3869 |
| QPAPCSQLL | HLA-B07:02 | KLK3 | Prostate | 3870 |
| APSHLPQNF | HLA-B07:02 | KLK3 | Prostate | 3871 |
| QPAPCSQL | HLA-B07:02 | KLK3 | Prostate | 3872 |
| SPDCQAEAL | HLA-B07:02 | KLK3 | Prostate | 3873 |
| MPALPMVL | HLA-B07:02 | KLK3 | Prostate | 3874 |
| VPVVFLTL | HLA-B07:02 | KLK3 | Prostate | 3875 |
| CIRNKSVIL | HLA-B08:01 | KLK3 | Prostate | 3876 |
| LPMVLHGSL | HLA-B08:01 | KLK3 | Prostate | 3877 |
| ILLGRHSL | HLA-B08:01 | KLK3 | Prostate | 3878 |
| LMLLRLSEPA | HLA-B08:01 | KLK2; KLK3 | Prostate | 3879 |
| LVASRGRAV | HLA-B08:01 | KLK3 | Prostate | 3880 |
| ILLGRHSLF | HLA-B08:01 | KLK3 | Prostate | 3881 |
| LMLLRLSEPAEL | HLA-B08:01 | KLK3 | Prostate | 3882 |
| FPHPLYDMSL | HLA-B08:01 | KLK3 | Prostate | 3883 |
| LLKNRFLRPG | HLA-B08:01 | KLK3 | Prostate | 3884 |
| HCIRNKSVIL | HLA-B08:01 | KLK3 | Prostate | 3885 |
| HPLYDMSL | HLA-B08:01 | KLK3 | Prostate | 3886 |
| WVILITEL | HLA-B08:01 | KLK3 | Prostate | 3887 |
| ELGSFLSL | HLA-B08:01 | KLK3 | Prostate | 3888 |
| HPSPDREL | HLA-B08:01 | KLK3 | Prostate | 3889 |
| TPKKLQCV | HLA-B08:01 | KLK3 | Prostate | 3890 |
| VILLGRHSL | HLA-B08:01 | KLK3 | Prostate | 3891 |
| DVLTPKKL | HLA-B08:01 | KLK3 | Prostate | 3892 |
| FLTPKKLQC | HLA-B08:01 | KLK3 | Prostate | 3893 |
| RELGSFLSL | HLA-B13:02 | KLK3 | Prostate | 3894 |
| LIMPALPMV | HLA-B13:02 | KLK3 | Prostate | 3895 |
| STCSWVILI | HLA-B13:02 | KLK3 | Prostate | 3896 |
| LQAHTPSPSI | HLA-B13:02 | KLK3 | Prostate | 3897 |
| RAVCGGVLV | HLA-B13:02 | KLK3 | Prostate | 3898 |
| VTWIGAAPLI | HLA-B13:02 | KLK3 | Prostate | 3899 |
| LQCVDLHVI | HLA-B13:02 | KLK3 | Prostate | 3900 |
| TELTMPALPMV | HLA-B13:02 | KLK3 | Prostate | 3901 |
| HSQPWQVLV | HLA-B13:02 | KLK3 | Prostate | 3902 |
| AQVHPQKV | HLA-B13:02 | KLK3 | Prostate | 3903 |
| QQSSLPHQV | HLA-B13:02 | KLK3 | Prostate | 3904 |
| GVLVHPQWV | HLA-B13:02 | KLK2; | Prostate | 3905 |
| | | KLK3; KLK4 | | |
| ELTDAVKV | HLA-B13:02 | KLK3 | Prostate | 3906 |
| HLPQNFLPI | HLA-B13:02 | KLK3 | Prostate | 3907 |
| SQPWQVLV | HLA-B13:02 | KLK3 | Prostate | 3908 |
| AELTDAVKV | HLA-B13:02 | KLK3 | Prostate | 3909 |
| HSFPHPLYDM | HLA-B46:01 | KLK3 | Prostate | 3910 |
| WIAPPLQVL | HLA-B46:01 | KLK3 | Prostate | 3911 |
| LTMPALPMVL | HLA-B46:01 | KLK3 | Prostate | 3912 |
| QVFQVSHSF | HLA-B46:01 | KLK3 | Prostate | 3913 |
| LTMPALPMV | HLA-B46:01 | KLK3 | Prostate | 3914 |
| STCSVSHPY | HLA-B46:01 | KLK3 | Prostate | 3915 |
| VSHSFPHPL | HLA-B46:01 | KLK2; KLK3 | Prostate | 3916 |
| TMPALPMVL | HLA-B46:01 | KLK3 | Prostate | 3917 |
| HLPQNFLPI | HLA-B46:01 | KLK3 | Prostate | 3918 |
| WIKDTIVAN | HLA-B46:01 | KLK3 | Prostate | 3919 |
| VSHPYSQDL | HLA-B46:01 | KLK3 | Prostate | 3920 |
| SLYTKVVHY | HLA-B46:01 | KLK3 | Prostate | 3921 |
| ALPERPSLY | HLA-B46:01 | KLK3 | Prostate | 3922 |
| GSIEPEEF | HLA-B46:01 | KLK2: KLK3 | Prostate | 3923 |
| VSHPYSQD | HLA-B46:01 | KLK3 | Prostate | 3924 |
| SLPAPLQAH | HLA-B46:01 | KLK3 | Prostate | 3925 |
| TMPALPMVL | HLA-C01:02 | KLK3 | Prostate | 3926 |
| WIAPPLQVL | HLA-C01:02 | KLK3 | Prostate | 3927 |
| VSHSFPHPL | HLA-C01:02 | KLK2; KLK3 | Prostate | 3928 |
| VTWIGAAPL | HLA-C01:02 | KLK3 | Prostate | 3929 |
| HLPQNFLPI | HLA-C01:02 | KLK3 | Prostate | 3930 |
| ITELTMPAL | HLA-C01:02 | KLK3 | Prostate | 3931 |
| LTMPALPMVL | HLA-C01:02 | KLK3 | Prostate | 3932 |
| IAPPLQVLV | HLA-C01:02 | KLK3 | Prostate | 3933 |
| SVTWIAPPL | HLA-C01:02 | KLK3 | Prostate | 3934 |
| ALPERPSL | HLA-C01:02 | KLK3 | Prostate | 3935 |
| WVPVVFLTL | HLA-C01:02 | KLK3 | Prostate | 3936 |
| ASPDCQAEAL | HLA-C01:02 | KLK3 | Prostate | 3937 |
| IAPPLQVL | HLA-C01:02 | KLK3 | Prostate | 3938 |
| AQPAPCSQL | HLA-C01:02 | KLK3 | Prostate | 3939 |
| QHPSPDREL | HLA-C01:02 | KLK3 | Prostate | 3940 |
| DLPTQEPAL | HLA-C01:02 | KLK3 | Prostate | 3941 |
| SLPAPLQAH | HLA-C01:02 | KLK3 | Prostate | 3942 |
| WIAPPLQVL | HLA-C03:04 | KLK3 | Prostate | 3943 |
| VSHSFPHPL | HLA-C03:04 | KLK2; KLK3 | Prostate | 3944 |
| VTWIGAAPL | HLA-C03:04 | KLK3 | Prostate | 3945 |
| SVTWIAPPL | HLA-C03:04 | KLK3 | Prostate | 3946 |
| LTMPALPMV | HLA-C03:04 | KLK3 | Prostate | 3947 |
| LAVCGGVLV | HLA-C03:04 | KLK3 | Prostate | 3948 |
| CALPERPSL | HLA-C03:04 | KLK3 | Prostate | 3949 |
| RAVCGGVLV | HLA-C03:04 | KLK3 | Prostate | 3950 |
| LIMPALPMVL | HLA-C03:04 | KLK3 | Prostate | 3951 |
| IAPPLQVL | HLA-C03:04 | KLK3 | Prostate | 3952 |
| VSHPYSQDL | HLA-C03:04 | KLK3 | Prostate | 3953 |
| LAVCGGVL | HLA-C03:04 | KLK3 | Prostate | 3954 |
| HQVPAPSHL | HLA-C03:04 | KLK3 | Prostate | 3955 |
| WVPVVFLTL | HLA-C03:04 | KLK3 | Prostate | 3956 |
| FHPEDTGQVF | HLA-C04:01 | KLK3 | Prostate | 3957 |
| SFPHPLYDM | HLA-C04:01 | KLK3 | Prostate | 3958 |
| SHSFPHPLY | HLA-C04:01 | KLK2; KLK3 | Prostate | 3959 |
| TMPALPMVL | HLA-C04:01 | KLK3 | Prostate | 3960 |
| CYASGWGSI | HLA-C04:01 | KLK2; KLK3 | Prostate | 3961 |
| LYDMSLLKNRF | HLA-C04:01 | KLK3 | Prostate | 3962 |
| SFLSLPAPL | HLA-C04:01 | KLK3 | Prostate | 3963 |
| WIAPPLQVL | HLA-C04:01 | KLK3 | Prostate | 3964 |
| HLPQNFLPI | HLA-C04:01 | KLK3 | Prostate | 3965 |
| MWVPVVFL | HLA-C04:01 | KLK3 | Prostate | 3966 |
| VFQVSHSF | HLA-C04:01 | KLK3 | Prostate | 3967 |
| SWVILITEL | HLA-C04:01 | KLK3 | Prostate | 3968 |
| RLSEPAEL | HLA-C04:01 | KLK3 | Prostate | 3969 |
| FLSLPAPL | HLA-C04:01 | KLK3 | Prostate | 3970 |
| VMDLPTQE | HLA-C04:01 | KLK3 | Prostate | 3971 |
| SIEPEEFL | HLA-C04:01 | KLK2; KLK3 | Prostate | 3972 |
| HTPSPSIL | HLA-C04:01 | KLK3 | Prostate | 3973 |
| IRNKSVILL | HLA-C07:01 | KLK3 | Prostate | 3974 |
| YRKWIKDTI | HLA-C07:01 | KLK2; KLK3 | Prostate | 3975 |
| HSFPHPLYDM | HLA-C07:01 | KLK3 | Prostate | 3976 |
| LRLSEPAEL | HLA-C07:01 | KLK3 | Prostate | 3977 |
| HSQPWQVLV | HLA-C07:01 | KLK3 | Prostate | 3978 |
| CIRNKSVILL | HLA-C07:01 | KLK3 | Prostate | 3979 |
| GRAVCGGVL | HLA-C07:01 | KLK3 | Prostate | 3980 |
| YRKWIKDTIV | HLA-C07:01 | KLK3 | Prostate | 3981 |
| MSLLKNRFL | HLA-C07:01 | KLK3 | Prostate | 3982 |
| HSFPHPLYDMSL | HLA-C07:01 | KLK3 | Prostate | 3983 |
| HSFPHPLYD | HLA-C07:01 | KLK3 | Prostate | 3984 |
| HSQPWQVL | HLA-C07:01 | KLK3 | Prostate | 3985 |
| KHSQPWQVL | HLA-C07:01 | KLK3 | Prostate | 3986 |
| TPGPDVLIP | HLA-C07:01 | KLK3 | Prostate | 3987 |
| HPEDTGQVE | HLA-C07:01 | KLK3 | Prostate | 3988 |
| HPSPDREL | HLA-C07:01 | KLK3 | Prostate | 3989 |
| IRNKSVIL | HLA-C07:01 | KLK3 | Prostate | 3990 |
| RELGSFLSL | HLA-C07:01 | KLK3 | Prostate | 3991 |
| IRNKSVILL | HLA-C07:02 | KLK3 | Prostate | 3992 |
| YRKWIKDTI | HLA-C07:02 | KLK2; KLK3 | Prostate | 3993 |
| HSFPHPLYDM | HLA-C07:02 | KLK3 | Prostate | 3994 |
| LRLSEPAEL | HLA-C07:02 | KLK3 | Prostate | 3995 |
| TMPALPMVL | HLA-C07:02 | KLK3 | Prostate | 3996 |
| VHPQKVTKF | HLA-C07:02 | KLK3 | Prostate | 3997 |
| VSHSFPHPL | HLA-C07:02 | KLK2; KLK3 | Prostate | 3998 |
| SHSFPHPLY | HLA-C07:02 | KLK2; KLK3 | Prostate | 3999 |
| SFPHPLYDM | HLA-C07:02 | KLK3 | Prostate | 4000 |
| CYASGWGSI | HLA-C07:02 | KLK2; KLK3 | Prostate | 4001 |
| LRPGDDSTL | HLA-C07:02 | KLK3 | Prostate | 4002 |
| IAPPLQVL | HLA-C07:02 | KLK3 | Prostate | 4003 |
| IRNKSVIL | HLA-C07:02 | KLK3 | Prostate | 4004 |
| ALPERPSL | HLA-C07:02 | KLK3 | Prostate | 4005 |
| LYTKVVHY | HLA-C07:02 | KLK3 | Prostate | 4006 |
| ALPERPSLY | HLA-C07:02 | KLK3 | Prostate | 4007 |
| VSEEVCSKLY | HLA-A01:01 | KLK4 | Prostate | 4008 |
| CSKLYDPLY | HLA-A01:01 | KLK4 | Prostate | 4009 |
| LSAAHCFQNSY | HLA-A01:01 | KLK4 | Prostate | 4010 |
| VVSEEVCSKLY | HLA-A01:01 | KLK4 | Prostate | 4011 |
| VLSAAHCFQNSY | HLA-A01:01 | KLK4 | Prostate | 4012 |
| SVVSEEVCSKLY | HLA-A01:01 | KLK4 | Prostate | 4013 |
| SAAHCFQNSY | HLA-A01:01 | KLK4 | Prostate | 4014 |
| ASLSVRHPEY | HLA-A01:01 | KLK4 | Prostate | 4015 |
| SLSVRHPEY | HLA-A01:01 | KLK4 | Prostate | 4016 |
| VSEEVCSKL | HLA-A01:01 | KLK4 | Prostate | 4017 |
| VSESDTIRS | HLA-A01:01 | KLK4 | Prostate | 4018 |
| KLDESVSES | HLA-A01:01 | KLK4 | Prostate | 4019 |
| FTEWIEKT | HLA-A01:01 | KLK4 | Prostate | 4020 |
| SEEVCSKLY | HLA-A01:01 | KLK4 | Prostate | 4021 |
| ESDTIRSIS | HLA-A01:01 | KLK4 | Prostate | 4022 |
| FLGYLILGV | HLA-A02:01 | KLK4 | Prostate | 4023 |
| LLANDLMLI | HLA-A02:01 | KLK4 | Prostate | 4024 |
| FQNSYTIGL | HLA-A02:01 | KLK4 | Prostate | 4025 |
| QMVEASLSV | HLA-A02:01 | KLK4 | Prostate | 4026 |
| MLIKLDESV | HLA-A02:01 | KLK4 | Prostate | 4027 |
| VLQCVNVSV | HLA-A02:01 | KLK4 | Prostate | 4028 |
| LLANGRMPTV | HLA-A02:01 | KLK4 | Prostate | 4029 |
| SQMVEASLSV | HLA-A02:01 | KLK4 | Prostate | 4030 |
| YLILGVAGSL | HLA-A02:01 | KLK4 | Prostate | 4031 |
| WFLGYLILGV | HLA-A02:01 | KLK4 | Prostate | 4032 |
| RMPTVLQCV | HLA-A02:01 | KLK4 | Prostate | 4033 |
| FLGYLILGVA | HLA-A02:01 | KLK4 | Prostate | 4034 |
| YLILGVAGSLV | HLA-A02:01 | KLK4 | Prostate | 4035 |
| LMLIKLDESV | HLA-A02:01 | KLK4 | Prostate | 4036 |
| VLQCVNVSVV | HLA-A02:01 | KLK4 | Prostate | 4037 |
| PLLANDLMLI | HLA-A02:01 | KLK4 | Prostate | 4038 |
| GLLANGRMPTV | HLA-A02:01 | KLK4 | Prostate | 4039 |
| YNRPLLANDLML | HLA-A02:01 | KLK4 | Prostate | 4040 |
| TVLQCVNVSV | HLA-A02:01 | KLK4 | Prostate | 4041 |
| NELFCSGVLV | HLA-A02:01 | KLK4 | Prostate | 4042 |
| KLYDPLYHPS | HLA-A02:01 | KLK4 | Prostate | 4043 |
| MENELFCSGVLV | HLA-A02:01 | KLK4 | Prostate | 4044 |
| RPLLANDLML | HLA-A02:01 | KLK4 | Prostate | 4045 |
| ILGVAGSLV | HLA-A02:01 | KLK4 | Prostate | 4046 |
| MPTVLQCVNVSV | HLA-A02:01 | KLK4 | Prostate | 4047 |
| YLILGVAGS | HLA-A02:01 | KLK4 | Prostate | 4048 |
| ELFCSGVLV | HLA-A02:01 | KLK4 | Prostate | 4049 |
| KLYDPLYHPSM | HLA-A02:01 | KLK4 | Prostate | 4050 |
| KLYDPLYHP | HLA-A02:01 | KLK4 | Prostate | 4051 |
| KLDESVSES | HLA-A02:01 | KLK4 | Prostate | 4052 |
| LLANDLMLIKL | HLA-A02:01 | KLK4 | Prostate | 4053 |
| GLGLHSLEA | HLA-A02:01 | KLK4 | Prostate | 4054 |
| PLLANDLML | HLA-A02:01 | KLK4 | Prostate | 4055 |
| YTIGLGLHSL | HLA-A02:01 | KLK4 | Prostate | 4056 |
| YLQGLVSFG | HLA-A02:01 | KLK4 | Prostate | 4057 |
| KLYDPLYH | HLA-A02:01 | KLK4 | Prostate | 4058 |
| GLLANECL | HLA-A02:01 | KLK4 | Prostate | 4059 |
| YLQGLVSF | HLA-A02:01 | KLK4 | Prostate | 4060 |
| CLVSGWGLL | HLA-A02:01 | KLK4 | Prostate | 4061 |
| TIGLGLHSL | HLA-A02:01 | KLK4 | Prostate | 4062 |
| VLSAAHCFQK | HLA-A03:01 | KLK4 | Prostate | 4063 |
| LLANDLMLIK | HLA-A03:01 | KLK4 | Prostate | 4064 |
| YLQGLVSFGK | HLA-A03:01 | KLK4 | Prostate | 4065 |
| LSAAHCFQK | HLA-A03:01 | KLK4 | Prostate | 4066 |
| SMFCAGGGHDQK | HLA-A03:01 | KLK4 | Prostate | 4067 |
| WVLSAAHCFQK | HLA-A03:01 | KLK4 | Prostate | 4068 |
| KLYDPLYH | HLA-A03:01 | KLK4 | Prostate | 4069 |
| LANDLMLIK | HLA-A03:01 | KLK4 | Prostate | 4070 |
| QWVLSAAHCFQK | HLA-A03:01 | KLK4 | Prostate | 4071 |
| PLLANDLMLIK | HLA-A03:01 | KLK4 | Prostate | 4072 |
| KLYDPLYHP | HLA-A03:01 | KLK4 | Prostate | 4073 |
| IVVSEEVCSK | HLA-A03:01 | KLK4 | Prostate | 4074 |
| NPWGWFLGY | HLA-A03:01 | KLK4 | Prostate | 4075 |
| ATAGNPWGW | HLA-A03:01 | KLK4 | Prostate | 4076 |
| SVSESDTIR | HLA-A03:01 | KLK4 | Prostate | 4077 |
| SVVSEEVCSK | HLA-A03:01 | KLK4 | Prostate | 4078 |
| LSAAHCFQK | HLA-A11:01 | KLK4 | Prostate | 4079 |
| VLSAAHCFQK | HLA-A11:01 | KLK4 | Prostate | 4080 |
| SVVSEEVCSK | HLA-A11:01 | KLK4 | Prostate | 4081 |
| LLANDLMLIK | HLA-A11:01 | KLK4 | Prostate | 4082 |
| LANDLMLIK | HLA-A11:01 | KLK4 | Prostate | 4083 |
| VVSEEVCSK | HLA-A11:01 | KLK4 | Prostate | 4084 |
| YLQGLVSFGK | HLA-A11:01 | KLK4 | Prostate | 4085 |
| LQGLVSFGK | HLA-A11:01 | KLK4 | Prostate | 4086 |
| SMFCAGGGHDQK | HLA-A11:01 | KLK4 | Prostate | 4087 |
| WVLSAAHCFQK | HLA-All:01 | KLK4 | Prostate | 4088 |
| GVPGVYTNLCK | HLA-A11:01 | KLK4 | Prostate | 4089 |
| SVSESDTIR | HLA-A11:01 | KLK4 | Prostate | 4090 |
| ATAGNPWGW | HLA-A11:01 | KLK4 | Prostate | 4091 |
| GVAGSLVSG | HLA-A11:01 | KLK4 | Prostate | 4092 |
| CKFTEWIEK | HLA-A11:01 | KLK4 | Prostate | 4093 |
| QYLQGLVSF | HLA-A24:02 | KLK4 | Prostate | 4094 |
| NGYLQGLVSF | HLA-A24:02 | KLK4 | Prostate | 4095 |
| PWGWPLGYLI | HLA-A24:02 | KLK4 | Prostate | 4096 |
| ICNGYLQGLVSF | HLA-A24:02 | KLK4 | Prostate | 4097 |
| LYDPLYHPSMF | HLA-A24:02 | KLK4 | Prostate | 4098 |
| VYTNLCKFTEW | HLA-A24:02 | KLK4 | Prostate | 4099 |
| CNGYLQGLVSF | HLA-A24:02 | KLK4 | Prostate | 4100 |
| GWFLGYLIL | HLA-A24:02 | KLK4 | Prostate | 4101 |
| KLYDPLYHPSMF | HLA-A24:02 | KLK4 | Prostate | 4102 |
| ALVMENELF | HLA-A24:02 | KLK4 | Prostate | 4103 |
| SYTIGLGLHSL | HLA-A24:02 | KLK4 | Prostate | 4104 |
| SYTIGLGL | HLA-A24:02 | KLK4 | Prostate | 4105 |
| LYDPLYHPSM | HLA-A24:02 | KLK4 | Prostate | 4106 |
| SYTIGLGLH | HLA-A24:02 | KLK4 | Prostate | 4107 |
| VYTNLCKFTE | HLA-A24:02 | KLK4 | Prostate | 4108 |
| LSAAHCFQK | HLA-A30:01 | KLK4 | Prostate | 4109 |
| TIRSISIAS | HLA-A30:01 | KLK4 | Prostate | 4110 |
| VLSAAHCFQK | HLA-A30:01 | KLK4 | Prostate | 4111 |
| LANDLMLIK | HLA-A30:01 | KLK4 | Prostate | 4112 |
| ASLSVRHPE | HLA-A30:01 | KLK4 | Prostate | 4113 |
| RSISIASQCPTA | HLA-A30:01 | KLK4 | Prostate | 4114 |
| AAHCFQNSY | HLA-A30:01 | KLK4 | Prostate | 4115 |
| LVHPQWVLS | HLA-A30:01 | KLK4 | Prostate | 4116 |
| LYHPSMFCA | HLA-A30:01 | KLK4 | Prostate | 4117 |
| KFTEWIEK | HLA-A30:01 | KLK4 | Prostate | 4118 |
| VVSEEVCSK | HLA-A30:01 | KLK4 | Prostate | 4119 |
| RSISIASQC | HLA-A30:01 | KLK4 | Prostate | 4120 |
| SVVSEEVCSK | HLA-A30:01 | KLK4 | Prostate | 4121 |
| CKFTEWIEK | HLA-A30:01 | KLK4 | Prostate | 4122 |
| LCKFTEWIEK | HLA-A30:01 | KLK4 | Prostate | 4123 |
| ASLSVRHPEY | HLA-A30:01 | KLK4 | Prostate | 4124 |
| GVPGVYTNL | HLA-A30:01 | KLK4 | Prostate | 4125 |
| SVRHPEYNR | HLA-A30:01 | KLK4 | Prostate | 4126 |
| SVRHPEYNR | HLA-A33:03 | KLK4 | Prostate | 4127 |
| MVEASLSVR | HLA-A33:03 | KLK4 | Prostate | 4128 |
| LSVRHPEYNR | HLA-A33:03 | KLK4 | Prostate | 4129 |
| SGWGLLANGR | HLA-A33:03 | KLK4 | Prostate | 4130 |
| SLSVRHPEYNR | HLA-A33:03 | KLK4 | Prostate | 4131 |
| QMVEASLSVR | HLA-A33:03 | KLK4 | Prostate | 4132 |
| SVSESDTIR | HLA-A33:03 | KLK4 | Prostate | 4133 |
| ASLSVRHPEYNR | HLA-A33:03 | KLK4 | Prostate | 4134 |
| LSAAHCFQK | HLA-A33:03 | KLK4 | Prostate | 4135 |
| EYNRPLLAN | HLA-A33:03 | KLK4 | Prostate | 4136 |
| ESVSESDTIR | HLA-A33:03 | KLK4 | Prostate | 4137 |
| EWIEKTVQA | HLA-A33:03 | KLK4 | Prostate | 4138 |
| EYNRPLLAND | HLA-A33:03 | KLK4 | Prostate | 4139 |
| TNLCKFTEW | HLA-A33:03 | KLK4 | Prostate | 4140 |
| WFLGYLILG | HLA-A33:03 | KLK4 | Prostate | 4141 |
| HPQWVLSAA | HLA-B07:02 | KLK4 | Prostate | 4142 |
| HPEYNRPLL | HLA-B07:02 | KLK4 | Prostate | 4143 |
| RHPEYNRPLL | HLA-B07:02 | KLK4 | Prostate | 4144 |
| SPHSQPWQAAL | HLA-B07:02 | KLK4 | Prostate | 4145 |
| QPWQAALVM | HLA-B07:02 | KLK4 | Prostate | 4146 |
| SQPWQAALVM | HLA-B07:02 | KLK4 | Prostate | 4147 |
| RPLLANDLM | HLA-B07:02 | KLK4 | Prostate | 4148 |
| CPTAGNSCL | HLA-B07:02 | KLK4 | Prostate | 4149 |
| RPLLANDLML | HLA-B07:02 | KLK4 | Prostate | 4150 |
| NPWGWFLGYL | HLA-B07:02 | KLK4 | Prostate | 4151 |
| SPHSQPWQAA | HLA-B07:02 | KLK4 | Prostate | 4152 |
| RPLLANDL | HLA-B07:02 | KLK4 | Prostate | 4153 |
| HPQWVLSAA | HLA-B08:01 | KLK4 | Prostate | 4154 |
| LMLIKLDESV | HLA-B08:01 | KLK4 | Prostate | 4155 |
| LANGRMPTVL | HLA-B08:01 | KLK4 | Prostate | 4156 |
| YDPLYHPSMF | HLA-B08:01 | KLK4 | Prostate | 4157 |
| TIGLGLHSL | HLA-B08:01 | KLK4 | Prostate | 4158 |
| HPEYNRPL | HLA-B08:01 | KLK4 | Prostate | 4159 |
| YLILGVAGSL | HLA-B08:01 | KLK4 | Prostate | 4160 |
| LANGRMPTV | HLA-B08:01 | KLK4 | Prostate | 4161 |
| LLANGRMPTV | HLA-B08:01 | KLK4 | Prostate | 4162 |
| YLQGLVSF | HLA-B08:01 | KLK4 | Prostate | 4163 |
| NGRMPTVL | HLA-B08:01 | KLK4 | Prostate | 4164 |
| IGLGLHSL | HLA-B08:01 | KLK4 | Prostate | 4165 |
| DLMLIKLD | HLA-B08:01 | KLK4 | Prostate | 4166 |
| LIKLDESV | HLA-B08:01 | KLK4 | Prostate | 4167 |
| EWIEKTVQ | HLA-B08:01 | KLK4 | Prostate | 4168 |
| YLILGVAG | HLA-B08:01 | KLK4 | Prostate | 4169 |
| HPQWVISA | HLA-B08:01 | KLK4 | Prostate | 4170 |
| MENELFCSGVLV | HLA-B13:02 | KLK4 | Prostate | 4171 |
| MENELFCSGV | HLA-B13:02 | KLK4 | Prostate | 4172 |
| WGWFLGYLI | HLA-B13:02 | KLK4 | Prostate | 4173 |
| SQMVEASLSV | HLA-B13:02 | KLK4 | Prostate | 4174 |
| NELFCSGVLV | HLA-B13:02 | KLK4 | Prostate | 4175 |
| SESDTIRSI | HLA-B13:02 | KLK4 | Prostate | 4176 |
| GNPWGWFLGYLI | HLA-B13:02 | KLK4 | Prostate | 4177 |
| MENELFCSGVL | HLA-B13:02 | KLK4 | Prostate | 4178 |
| HCFQNSYTI | HLA-B13:02 | KLK4 | Prostate | 4179 |
| DQEPGSQMV | HLA-B13:02 | KLK4 | Prostate | 4180 |
| RMPTVLQCV | HLA-B13:02 | KLK4 | Prostate | 4181 |
| ELFCSGVLV | HLA-B13:02 | KLK4 | Prostate | 4182 |
| SQPWQAALV | HLA-B13:02 | KLK4 | Prostate | 4183 |
| FLGYLILGV | HLA-B13:02 | KLK4 | Prostate | 4184 |
| GQVGVPGV | HLA-B13:02 | KLK4 | Prostate | 4185 |
| YTIGLGLHSL | HLA-B46:01 | KLK4 | Prostate | 4186 |
| AAHCFQNSY | HLA-B46:01 | KLK4 | Prostate | 4187 |
| FQNSYTIGL | HLA-B46:01 | KLK4 | Prostate | 4188 |
| GQVGVPGVY | HLA-B46:01 | KLK4 | Prostate | 4189 |
| SAAHCFQNSY | HLA-B46:01 | KLK4 | Prostate | 4190 |
| QMVEASLSV | HLA-B46:01 | KLK4 | Prostate | 4191 |
| LANGRMPTV | HLA-B46:01 | KLK4 | Prostate | 4192 |
| YLILGVAGSL | HLA-B46:01 | KLK4 | Prostate | 4193 |
| LLANDLMLI | HLA-B46:01 | KLK4 | Prostate | 4194 |
| CGQVGVPGVY | HLA-B46:01 | KLK4 | Prostate | 4195 |
| TAGNPWGWF | HLA-B46:01 | KLK4 | Prostate | 4196 |
| YLQGLVSF | HLA-B46:01 | KLK4 | Prostate | 4197 |
| KLYDPLYH | HLA-B46:01 | KLK4 | Prostate | 4198 |
| SLSVRHPEY | HLA-B46:01 | KLK4 | Prostate | 4199 |
| TIRSISIAS | HLA-B46:01 | KLK4 | Prostate | 4200 |
| VSGWGLLAN | HLA-B46:01 | KLK4 | Prostate | 4201 |
| VSVVSEEV | HLA-B46:01 | KLK4 | Prostate | 4202 |
| SLVSGSCSQ | HLA-B46:01 | KLK4 | Prostate | 4203 |
| FQNSYTIGL | HLA-C01:02 | KLK4 | Prostate | 4204 |
| GVPGVYTNL | HLA-C01:02 | KLK4 | Prostate | 4205 |
| RMPTVLQCV | HLA-C01:02 | KLK4 | Prostate | 4206 |
| RHPEYNRPL | HLA-C01:02 | KLK4 | Prostate | 4207 |
| LANGRMPTV | HLA-C01:02 | KLK4 | Prostate | 4208 |
| NSYTIGLGL | HLA-C01:02 | KLK4 | Prostate | 4209 |
| YTIGLGLHSL | HLA-C01:02 | KLK4 | Prostate | 4210 |
| LLANDLMLI | HLA-C0L:02 | KLK4 | Prostate | 4211 |
| TIGLGLHSL | HLA-C01:02 | KLK4 | Prostate | 4212 |
| QCPTAGNSCL | HLA-C01:02 | KLK4 | Prostate | 4213 |
| QCPTAGNSC | HLA-C01:02 | KLK4 | Prostate | 4214 |
| YDPLYHPSM | HLA-C01:02 | KLK4 | Prostate | 4215 |
| NRPLLANDL | HLA-C01:02 | KLK4 | Prostate | 4216 |
| KAPCGQVGV | HLA-C01:02 | KLK4 | Prostate | 4217 |
| LANGRMPTVL | HLA-C01:02 | KLK4 | Prostate | 4218 |
| FQNSYTIGL | HLA-C03:04 | KLK4 | Prostate | 4219 |
| LANGRMPTV | HLA-C03:04 | KLK4 | Prostate | 4220 |
| YTIGLGLHSL | HLA-C03:04 | KLK4 | Prostate | 4221 |
| LILGVAGSL | HLA-C03:04 | KLK4 | Prostate | 4222 |
| NSYTIGLGL | HLA-C03:04 | KLK4 | Prostate | 4223 |
| QMVEASLSV | HLA-C03:04 | KLK4 | Prostate | 4224 |
| AALVMENEL | HLA-C03:04 | KLK4 | Prostate | 4225 |
| LANGRMPTVL | HLA-C03:04 | KLK4 | Prostate | 4226 |
| LVSGSCSQI | HLA-C03:04 | KLK4 | Prostate | 4227 |
| AGNPWGWFL | HLA-C03:04 | KLK4 | Prostate | 4228 |
| TAGNPWGWFL | HLA-C03:04 | KLK4 | Prostate | 4229 |
| LYDPLYHIPSM | HLA-C04:01 | KLK4 | Prostate | 4230 |
| LYDPLYHPSMF | HLA-C04:01 | KLK4 | Prostate | 4231 |
| FQNSYTIGL | HLA-C04:01 | KLK4 | Prostate | 4232 |
| KLYDPLYHPSMF | HLA-C04:01 | KLK4 | Prostate | 4233 |
| RMPTVLQCV | HLA-C04:01 | KLK4 | Prostate | 4234 |
| SQPWQAALVM | HLA-C04:01 | KLK4 | Prostate | 4235 |
| SQPWQAALV | HLA-C04:01 | KLK4 | Prostate | 4236 |
| RHPEYNRPLL | HLA-C04:01 | KLK4 | Prostate | 4237 |
| CFQNSYTIGL | HLA-C04:01 | KLK4 | Prostate | 4238 |
| ANDLMLIKL | HLA-C04:01 | KLK4 | Prostate | 4239 |
| LYDPLYHP | HLA-C04:01 | KLK4 | Prostate | 4240 |
| LFCSGVLV | HLA-C04:01 | KLK4 | Prostate | 4241 |
| KLDESVSES | HLA-C04:01 | KLK4 | Prostate | 4242 |
| YLQGLVSF | HLA-C04:01 | KLK4 | Prostate | 4243 |
| VSEEVCSKL | HLA-C04:01 | KLK4 | Prostate | 4244 |
| KLDESVSE | HLA-C04:01 | KLK4 | Prostate | 4245 |
| FQNSYTIGL | HLA-C07:01 | KLK4 | Prostate | 4246 |
| GRMPTVLQCV | HLA-C07:01 | KLK4 | Prostate | 4247 |
| VRHPEYNRPL | HLA-C07:01 | KLK4 | Prostate | 4248 |
| NRPLLANDL | HLA-C07:01 | KLK4 | Prostate | 4249 |
| NSYTIGLGL | HLA-C07:01 | KLK4 | Prostate | 4250 |
| LANGRMPTV | HLA-C07:01 | KLK4 | Prostate | 4251 |
| NRPLLANDLM | HLA-C07:01 | KLK4 | Prostate | 4252 |
| RHPEYNRPL | HLA-C07:01 | KLK4 | Prostate | 4253 |
| SQPWQAALV | HLA-C07:01 | KLK4 | Prostate | 4254 |
| GRMPTVLQC | HLA-C07:01 | KLK4 | Prostate | 4255 |
| AGNPWGWFL | HLA-C07:01 | KLK4 | Prostate | 4256 |
| ANGRMPTVL | HLA-C07:01 | KLK4 | Prostate | 4257 |
| SESDTIRSI | HLA-C07:01 | KLK4 | Prostate | 4258 |
| NPWGWFLGY | HLA-C07:01 | KLK4 | Prostate | 4259 |
| SYTIGLGL | HLA-C07:01 | KLK4 | Prostate | 4260 |
| TEWIEKTVQ | HLA-C07:01 | KLK4 | Prostate | 4261 |
| FQNSYTIGL | HLA-C07:02 | KLK4 | Prostate | 4262 |
| RHPEYNRPL | HLA-C07:02 | \|KLK4 | Prostate | 4263 |
| LYDPLYHPSM | HLA-C07:02 | KLK4 | Prostate | 4264 |
| VRHPEYNRPL | HLA-C07:02 | KLK4 | Prostate | 4265 |
| VHPQWVLSA | HLA-C07:02 | KLK4 | Prostate | 4266 |
| RHPEYNRPLL | HLA-C07:02 | KLK4 | Prostate | 4267 |
| NRPLLANDL | HLA-C07:02 | KLK4 | Prostate | 4268 |
| YNRPLLANDL | HLA-C07:02 | KLK4 | Prostate | 4269 |
| GYLQGLVSF | HLA-C07:02 | KLK4 | Prostate | 4270 |
| YDPLYHPSM | HLA-C07:02 | KLK4 | Prostate | 4271 |
| SYTIGLGL | HLA-C07:02 | KLK4 | Prostate | 4272 |
| VRHPEYNR | HLA-C07:02 | KLK4 | Prostate | 4273 |
| YLQGLVSF | HLA-C07:02 | KLK4 | Prostate | 4274 |
| SSDDKSKSNDPK | HLA-A01:01 | LELP1 | Testis | 4275 |
| SNDPKTEPK | HLA-A01:01 | LELP1 | Testis | 4276 |
| KSNDPKTEPK | HLA-A01:01 | LELP1 | Testis | 4277 |
| SSDDKSKS | HLA-A01:01 | LELP1 | Testis | 4278 |
| SSDDKSKSN | HLA-A01:01 | LELP1 | Testis | 4270 |
| SSDDKSKSND | HLA-A01:01 | LELP1 | Testis | 4280 |
| KLLQRCFEKC | HLA-A02:01 | LELP1 | Testis | 4281 |
| LLQRCFEKC | HLA-A02:01 | LELP1 | Testis | 4282 |
| CLKKLLQRC | HLA-A02:01 | LELP1 | Testis | 4283 |
| CQPSCLKKLL | HLA-A02:01 | LELP1 | Testis | 4284 |
| KLLQRCFEK | HLA-A02:01 | LELP1 | Testis | 4285 |
| CLPCPSQSPS | HLA-A02:01 | LELP1 | Testis | 4286 |
| CQPSCLKKL | HLA-A02:01 | LELP1 | Testis | 4287 |
| CLPCPSQSP | HLA-A02:01 | LELP1 | Testis | 4288 |
| KLLQRCFEKCPW | HLA-A02:01 | LELP1 | Testis | 4289 |
| KCQPSCLKKL | HLA-A02:01 | LELP1 | Testis | 4290 |
| KCPSSCPHA | HLA-A02:01 | LELP1 | Testis | 4291 |
| SCLKKLLQR | HLA-A02:01 | LELP1 | Testis | 4292 |
| KLLQRCFEK | HLA-A03:01 | LELP1 | Testis | 4293 |
| KKLLQRCFEK | HLA-A03:01 | LELP1 | Testis | 4294 |
| KSNDPKTEPK | HLA-A03:01 | LELP1 | Testis | 4295 |
| RCFEKCPWEK | HLA-A03:01 | LELP1 | Testis | 4296 |
| KCQPSCLKK | HLA-A03:01 | LELP1 | Testis | 4297 |
| SSCPPQPCTK | HLA-A11:01 | LELP1 | Testis | 4298 |
| KSNDPKTEPK | HLA-A11:01 | LELP1 | Testis | 4299 |
| KLLQRCFEK | HLA-A11:01 | LELP1 | Testis | 4300 |
| RCFEKCPWEK | HLA-A11:01 | LELP1 | Testis | 4301 |
| SCLKKLLQR | HLA-A11:01 | LELP1 | Testis | 4302 |
| KLLQRCFEKCPW | HLA-A24:02 | LELP1 | Testis | 4303 |
| CQPSCLKKL | HLA-A24:02 | LELP1 | Testis | 4304 |
| LLQRCFEKCPW | HLA-A24:02 | LELP1 | Testis | 4305 |
| KCPAPPKCL | HLA-A24:02 | LELP1 | Testis | 4306 |
| KCQPSCLKKL | HLA-A24:02 | LELP1 | Testis | 4307 |
| SCPPQPCTK | HLA-A24:02 | LELP1 | Testis | 4308 |
| KSKSNDPKTEPK | HLA-A30:01 | LELP1 | Testis | 4309 |
| KSNDPKTEPK | HLA-A30:01 | LELP1 | Testis | 4310 |
| CTKPCPPK | HLA-A30:01 | LELP1 | Testis | 4311 |
| RCFEKCPWEK | HLA-A30:01 | LELP1 | Testis | 4312 |
| KCQPSCLKK | HLA-A30:01 | LELP1 | Testis | 4313 |
| SSCPPQPCTK | HLA-A30:01 | LELP1 | Testis | 4314 |
| ESKCQPSCLK | HLA-A33:03 | LELP1 | Testis | 4315 |
| CLKKLLQR | HLA-A33:03 | LELP1 | Testis | 4316 |
| SCLKKLLQR | HLA-A33:03 | LELP1 | Testis | 4317 |
| PSCLKKLLQR | HLA-A33:03 | LELP1 | Testis | 4318 |
| QPSCLKKLL | HLA-B07:02 | LELP1 | Testis | 4319 |
| CPAPPKCL | HLA-B07:02 | LELP1 | Testis | 4320 |
| CPHACPPPC | HLA-B07:02 | LELP1 | Testis | 4321 |
| CPSQSPSSC | HLA-B07:02 | LELP1 | Testis | 4322 |
| CLKKLLQRCF | HLA-B08:01 | LELP1 | Testis | 4323 |
| ESKCQPSCL | HLA-B08:01 | LELP1 | Testis | 4324 |
| CPWEKCPA | HLA-B08:01 | LELP1 | Testis | 4325 |
| CPAPPKCL | HLA-B08:01 | LELP1 | Testis | 4326 |
| QPSCLKKLL | HLA-B08:01 | LELP1 | Testis | 4327 |
| QPSCLKKL | HLA-B08:01 | LELP1 | Testis | 4328 |
| CESKCQPSCL | HLA-B13:02 | LELP1 | Testis | 4329 |
| CESKCQPSC | HLA-B13:02 | LELP1 | Testis | 4330 |
| LQRCFEKCPW | HLA-B13:02 | LELP1 | Testis | 4331 |
| CQPSCLKKL | HLA-B13:02 | LELP1 | Testis | 4332 |
| CLKKLLQRC | HLA-B13:02 | LELP1 | Testis | 4333 |
| CQPSCLKK | HLA-B13:02 | LELP1 | Testis | 4334 |
| LQRCFEKCPW | HLA-B46:01 | LELP1 | Testis | 4335 |
| CLKKLLQRCF | HLA-B46:01 | LELP1 | Testis | 4336 |
| CQPSCLKKL | HLA-B46:01 | LELP1 | Testis | 4337 |
| KSNDPKTEP | HLA-B46:01 | LELP1 | Testis | 4338 |
| SSDDKSKSN | HLA-B46:01 | LELP1 | Testis | 4339 |
| HACPPPCPP | HLA-B46:01 | LELP1 | Testis | 4340 |
| CQPSCLKKL | HLA-C01:02 | LELP1 | Testis | 4341 |
| KCPAPPKCL | HLA-C01:02 | LELP1 | Testis | 4342 |
| CQPSCLKKLL | HLA-C01:02 | LELP1 | Testis | 4343 |
| KCPSSCPHAC | HLA-C01:02 | LELP1 | Testis | 4344 |
| CQPSCLKKL | HLA-C03:04 | LELP1 | Testis | 4345 |
| CPHACPPPC | HLA-C03:04 | LELP1 | Testis | 4346 |
| CPSQSPSSC | HLA-C03:04 | LELP1 | Testis | 4347 |
| HACPPPCPP | HLA-C03:04 | LELP1 | Testis | 4348 |
| KCPAPPKCL | HLA-C03:04 | LELP1 | Testis | 4349 |
| SSDDKSKSN | HLA-C03:04 | LELP1 | Testis | 4350 |
| CQPSCLKKL | HLA-C04:01 | LELP1 | Testis | 4351 |
| CFEKCPWEK | HLA-C04:01 | LELP1 | Testis | 4352 |
| CQPSCLKKLL | HLA-C04:01 | LELP1 | Testis | 4353 |
| SNDPKTEP | HLA-C04:01 | LELP1 | Testis | 4354 |
| KCPAPPKCL | HLA-C04:01 | LELP1 | Testis | 4355 |
| CQPSCLKKL | HLA-C07:01 | LELP1 | Testis | 4356 |
| LKKLLQRCF | HLA-C07:01 | LELP1 | Testis | 4357 |
| CQPSCLKKLL | HLA-C07:01 | LELP1 | Testis | 4358 |
| KSNDPKTEP | HLA-C07:01 | LELP1 | Testis | 4359 |
| SNDPKTEP | HLA-C07:01 | LELP1 | Testis | 4360 |
| KSNDPKTE | HLA-C07:01 | LELP1 | Testis | 4361 |
| CQPSCLKKL | HLA-C07:02 | LELP1 | Testis | 4362 |
| LKKLLQRCF | HLA-C07:02 | LELP1 | Testis | 4363 |
| CQPSCLKKLL | HLA-C07:02 | LELP1 | Testis | 4364 |
| KCPAPPKCL | HLA-C07:02 | LELP1 | Testis | 4365 |
| SCPPQPCTK | HLA-C07:02 | LELP1 | Testis | 4366 |
| SKCQPSCL | HLA-C07:02 | LELP1 | Testis | 4367 |
| EVDPTSHSY | HLA-A01:01 | MAGEA11 | Lung squam. | 4368 |
| LTQNWVQEKY | HLA-A01:01 | MAGEA11 | Lung squam. | 4369 |
| ETSKMKVLEY | HLA-A01:01 | MAGEA11 | Lung squam. | 4370 |
| IIDLVHLLL | HLA-A01:01 | MAGEA11 | Lung squam. | 4371 |
| KIIDLVHLL | HLA-A02:01 | MAGEA11 | Lung squam. | 4372 |
| KVLEYIANA | HLA-A02:01 | MAGEA11 | Lung squam. | 4373 |
| LLFGIDVKEV | HLA-A02:01 | MAGEA11 | Lung squam. | 4374 |
| VMWEVLSIMGV | HLA-A02:01 | MAGEA11 | Lung squam. | 4375 |
| VLWGPITQI | HLA-A02:01 | MAGEA11 | Lung squam. | 4376 |
| FLFGEPKRL | HLA-A02:01 | MAGEA11 | Lung squam. | 4377 |
| ILHDKIIDLV | HLA-A02:01 | MAGEA11 | Lung squam. | 4378 |
| VMWEVLSIM | HLA-A02:01 | MAGEA11 | Lung squam. | 4379 |
| FLWGPRAHA | HLA-A02:01 | MAGEA11 | Lung squam. | 4380 |
| ILHDKIIDL | HLA-A02:01 | MAGEA11 | Lung squam. | 4381 |
| GLLIIVLGV | HLA-A02:01 | MAGEA11 | Lung squam. | 4382 |
| ALREEGEGV | HLA-A02:01 | MAGEA11 | Lung squam. | 4383 |
| FLFGEPKRLL | HLA-A02:01 | MAGEA11 | Lung squam. | 4384 |
| IDLVHLLLRK | HLA-A03:01 | MAGEA11 | Lung squam. | 4385 |
| LLLRKYRVK | HLA-A03:01 | MAGEA11 | Lung squam. | 4386 |
| GLGCSPASIK | HLA-A03:01 | MAGEA11 | Lung squam. | 4387 |
| RLLTQNWVQEK | HLA-A03:01 | MAGEA11 | Lung squam. | 4388 |
| RKYRVKGLITK | HLA-A03:01 | MAGEA11 | Lung squam. | 4389 |
| KIIDLVHLLLR | HLA-A03:01 | MAGEA11 | Lung squam. | 4390 |
| SIMGVYAGR | HLA-A11:01 | MAGEA11 | Lung squam. | 4391 |
| LTQNWVQEK | HLA-A11:01 | MAGEA11 | Lung squam. | 4392 |
| KAEMLQSVIK | HLA-A11:01 | MAGEA11 | Lung squam. | 4393 |
| RVIMPLEQR | HLA-A11:01 | MAGEA11 | Lung squam. | 4394 |
| VYAGREHFLF | HLA-A24:02 | MAGEA11 | Lung squam. | 4395 |
| LWGPITQIF | HLA-A24:02 | MAGEA11 | Lung squam | 4396 |
| VLWGPITQIF | HLA-A24:02 | MAGEA11 | Lung squam. | 4397 |
| NYEDYFPEI | HLA-A24:02 | MAGEA11 | Lung squam. | 4398 |
| VYAGREHFL | HLA-A24:02 | MAGEA11 | Lung squam. | 4399 |
| KYRVKGLITK | HLA-A30:01 | MAGEA11 | Lung squam. | 4400 |
| MSKVSTMFS | HLA-A30:01 | MAGEA11 | Lung squam. | 4401 |
| RVKGLITKA | HLA-A30:01 | MAGEA11 | Lung squam. | 4402 |
| RVKGLITK | HLA-A30:01 | MAGEAI1 | Lung squam. | 4403 |
| LTQNWVQEK | HLA-A30:01 | MAGEA11 | Lung squam. | 4404 |
| SIMGVYAGR | HLA-A33:03 | MAGEA11 | Lung squam. | 4405 |
| LSIMGVYAGR | HLA-A33:03 | MAGEA11 | Lung squam. | 4406 |
| WVQEKYLVYR | HLA-A33:03 | MAGEA11 | Lung squam. | 4407 |
| EYIANANGR | HLA-A33:03 | MAGEA11 | Lung squam. | 4408 |
| EDYFPEIFR | HLA-A33:03 | MAGEA11 | Lung squam. | 4409 |
| RPADLTRVIM | HLA-B07:02 | MAGEA11 | Lung squam. | 4410 |
| RPADLTRVI | HLA-B07:02 | MAGEA11 | Lung squam. | 4411 |
| RPADLTRVIMPL | HLA-B07:02 | MAGEA11 | Lung squam. | 4412 |
| APYGPQLQW | HLA-B07:02 | MAGEA11 | Lung squam. | 4413 |
| SPSPPQSPQ | HLA-B07:02 | MAGEA11 | Lung squam. | 4414 |
| LLRKYRVKGL | HLA-B08:01 | MAGEA11 | Lung squam. | 4415 |
| HLLLRKYRV | HLA-B08:01 | MAGEA11 | Lung squam. | 4416 |
| LRKYRVKGL | HLA-B08:01 | MAGEA11 | Lung squam. | 4417 |
| FPTVRPADL | HLA-B08:01 | MAGEA11 | Lung squam. | 4418 |
| ILHDKIIDL | HLA-B08:01 | MAGEA11 | Lung squam. | 4419 |
| SGLLIIVL | HLA-B08:01 | MAGEA11 | Lung squam. | 4420 |
| MQLLFGIDV | HLA-B13:02 | MAGEA11 | Lung squam. | 4421 |
| WEVLSIMGV | HLA-B13:02 | MAGEA11 | Lung squam. | 4422 |
| REASVCMQL | HLA-B13:02 | MAGEA11 | Lung squam. | 4423 |
| VLWGPITQI | HLA-B13:02 | MAGEA11 | Lung squam | 4424 |
| SQDILHDKI | HLA-B13:02 | MAGEA11 | Lung squam. | 4425 |
| GLLIIVLGV | HLA-B13:02 | MAGEA11 | Lung squam. | 4426 |
| FQSTERAPY | HLA-B46:01 | MAGEA11 | Lung squam. | 4427 |
| HSYVLVTSL | HLA-B46:01 | MAGEA11 | Lung squam. | 4428 |
| LVTSLNLSY | HLA-B46:01 | MAGEA11 | Lung squam. | 4429 |
| FSPTAMDAIF | HLA-B46:01 | MAGEA11 | Lung squan. | 4430 |
| TSKMKVLEY | HLA-B46:01 | MAGEA11 | Lung squam. | 4431 |
| ILHDKIIDL | HLA-B46:01 | MAGEAI1 | Lung squam. | 4432 |
| FSPTAMDAI | HLA-C01:02 | MAGEA11 | Lung squam. | 4433 |
| SMPKSGLLI | HLA-C01:02 | MAGEA11 | Lung squam. | 4434 |
| AMDAIFGSL | HLA-C01:02 | MAGEA11 | Lung squam. | 4435 |
| RDPTSYPSL | HLA-C01:02 | MAGEA11 | Lung squam. | 4436 |
| RAPYGPQL | HLA-C01:02 | MAGEA11 | Lung squam. | 4437 |
| YVLVTSLNL | HLA-C03:04 | MAGEA11 | Lung squam. | 4438 |
| HSYVLVTSL | HLA-C03:04 | MAGEA11 | Lung squam. | 4439 |
| EAAFFSSTL | HLA-C03:04 | MAGEA11 | Lung squam. | 4440 |
| TAMDAIPGSL | HLA-C03:04 | MAGEA11 | Lung squam. | 4441 |
| AAFFSSTL | HLA-C03:04 | MAGEA11 | Lung squam. | 4442 |
| YEDYFPEIF | HLA-C04:01 | MAGEA11 | Lung squam. | 4443 |
| GTDPACYEF | HLA-C04:01 | MAGEA11 | Lung squam. | 4444 |
| AMDAIFGSL | HLA-C04:01 | MAGEA11 | Lung squam. | 4445 |
| IIDLVHLLL | HLA-C04:01 | MAGEA11 | Lung squam. | 4446 |
| IFREASVCM | HLA-C04:01 | MAGEA11 | Lung squam. | 4447 |
| FREASVCMQL | HLA-C07:01 | MAGEA11 | Lung squam. | 4448 |
| ERAPYGPQL | HLA-C07:01 | MAGEA11 | Lung squam | 4449 |
| LRKYRVKGL | HLA-C07:01 | MAGEA11 | Lung squam. | 4450 |
| KSGLLIIVL | HLA-C07:01 | MAGEA11 | Lung squam. | 4451 |
| RITGGEQVL | HLA-C07:01 | MAGEA11 | Lung squam. | 4452 |
| VYAGREHFL | HLA-C07:02 | MAGEA11 | Lung squam. | 4453 |
| FREASVCMQL | HLA-C07:02 | MAGEA11 | Lung squam. | 4454 |
| IFREASVCM | HLA-C07:02 | MAGEA11 | Lung squam. | 4455 |
| ERAPYGPQL | HLA-C07:02 | MAGEA11 | Lung squam. | 4456 |
| SYVLVTSL | HLA-C07:02 | MAGEA11 | Lung squam. | 4457 |
| LTQDLVQENY | HLA-A01:01 | MAGEA12 | Melanoma | 4458 |
| LVQENYLEY | HLA-A01:01 | MAGEA2; | Melanoma | 4459 |
| | | MAGEA12 | | |
| LLTQDLVQENY | HLA-A01:01 | MAGEA12 | Melanoma | 4460 |
| VVEVVRIGHLY | HLA-A01:01 | MAGEA12 | Melanoma | 4461 |
| MAELVHFLLLKY | HLA-A01:01 | MAGEA12 | Melanoma | 4462 |
| KMAELVHFL | HLA-A02:01 | MAGEA12 | Melanoma | 4463 |
| KMAELVHFLL | HLA-A02:01 | MAGEA12 | Melanoma | 4464 |
| FLWQPRALV | HLA-A02:01 | MAGEA12 | Melanoma | 4465 |
| RKMAELVHFL | HLA-A02:01 | MAGEA12 | Melanoma | 4466 |
| TLVEVTLREV | HLA-A02:01 | MAGEA12 | Melanoma | 4467 |
| YLQLVFGIEV | HLA-A02:01 | MAGEA2; | Melanoma | 4468 |
| | | MAGEA12 | | |
| KMAELVHFLLL | HLA-A02:01 | MAGEA12 | Melanoma | 4469 |
| KIWEELSVL | HLA-A02:01 | MAGEA12 | Melanoma | 4470 |
| LSRKMAELVHFL | HLA-A02:01 | MAGEA12 | Melanoma | 4471 |
| GLLGDNQIV | HLA-A02:01 | MAGEA12 | Melanoma | 4472 |
| ALVETSYVKV | HLA-A02:01 | MAGEA12 | Melanoma | 4473 |
| GLLIIVLAI | HLA-A02:01 | MAGEA2: | Melanoma | 4474 |
| | | MAGEA12 | | |
| FGIEVVEVV | HLA-A02:01 | MAGEA2: | Melanoma | 4475 |
| | | MAGEA12 | | |
| KMAELVHFLLLK | HLA-A03:01 | MAGEA12 | Melanoma | 4476 |
| AELVHFLLLK | HLA-A03:01 | MAGEA12 | Melanoma | 4477 |
| TSFQVALSRK | HLA-A03:01 | MAGEA12 | Melanoma | 4478 |
| RALVETSYVK | HLA-A03:01 | MAGEA12 | Melanoma | 4479 |
| GLLGDNQIVPK | HLA-A03:01 | MAGEA12 | Melanoma | 4480 |
| LLGDNQIVPK | HLA-A03:01 | MAGEA12 | Melanoma | 4481 |
| STLPTTINY | HLA-A03:01 | MAGEA12 | Melanoma | 4482 |
| TSFQVALSRK | HLA-A11:01 | MAGEA12 | Melanoma | 4483 |
| STLPTTINY | HLA-A11:01 | MAGEA12 | Melanoma | 4484 |
| ALVETSYVK | HLA-A11:01 | MAGEA12 | Melanoma | 4485 |
| AELVHFLLLK | HLA-A11:01 | MAGEA12 | Melanoma | 4486 |
| STLVEVTLR | HLA-A11:01 | MAGEA12 | Melanoma | 4487 |
| TSFQVALSR | HLA-A11:01 | MAGEA12 | Melanoma | 4488 |
| SYPPLHEWAF | HLA-A24:02 | MAGEA12 | Melanoma | 4489 |
| SYVKVLHHL | HLA-A24:02 | MAGEA12 | Melanoma | 4490 |
| SYVKVLHHLL | HLA-A24:02 | MAGEA12 | Melanoma | 4491 |
| RAREPFTKA | HLA-A30:01 | MAGEA12 | Melanoma | 4492 |
| KYRAREPFTK | HLA-A30:01 | MAGEA12 | Melanoma | 4493 |
| VVRIGHLYI | HLA-A30:01 | MAGEA12 | Melanoma | 4494 |
| STLPTTINY | HLA-A30:01 | MAGEA12 | Melanoma | 4495 |
| SVFAHPRKL | HLA-A30:01 | MAGEA2; MAGEA12 | Melanoma | 4496 |
| HFLLLKYRAR | HLA-A33:03 | MAGEA2; MAGEA12 | Melanoma | 4497 |
| DFFPVIFSK | HLA-A33:03 | MAGEA2; MAGEA12 | Melanoma | 4498 |
| LVHFLLLKYR | HLA-A33:03 | MAGEA2; MAGEA12 | Melanoma | 4499 |
| STLVEVTLR | HLA-A33:03 | MAGEA12 | Melanoma | 4500 |
| TSFQVALSR | HLA-A33:03 | MAGEA12 | Melanoma | 4501 |
| HPRKLLTQDL | HLA-B07:02 | MAGEA12 | Melanoma | 4502 |
| GPHISYPPL | HLA-B07:02 | MAGEA12 | Melanoma | 4503 |
| LPTTINYTL | HLA-B07:02 | MAGEA12 | Melanoma | 4504 |
| SPQGASTL | HLA-B07:02 | MAGEA12 | Melanoma | 4505 |
| SPSPPHSPQ | HLA-B07:02 | IMAGEA2; MAGEA12 | Melanoma | 4506 |
| LLKYRAREPF | HLA-B08:01 | MAGEA12 | Melanoma | 4507 |
| YVKVLHHLL | HLA-B08:01 | MAGEA12 | Melanoma | 4508 |
| FLLLKYRAREPF | HLA-B08:01 | MAGEA12 | Melanoma | 4509 |
| EPFTKAEML | HLA-B08:01 | MAGEA12 | Melanoma | 4510 |
| EEKIWEEL | HLA-B08:01 | MAGEA2; MAGEA12 | Melanoma | 4511 |
| YVKVLHHL | HLA-B08:01 | MAGEA12 | Melanoma | 4512 |
| SEYLQLVFGI | HLA-B13:02 | MAGEA2; MAGEA12 | Melanoma | 4513 |
| RNPQDFFPV | HLA-B13:02 | MAGEA12 | Melanoma | 4514 |
| YEFLWGPRALV | HLA-B13:02 | MAGEA12 | Melanoma | 4515 |
| GLLIIVLAI | HLA-B13:02 | MAGEA2; MAGEA12 | Melanoma | 4516 |
| KVLHHLLKI | HLA-B13:02 | MAGEA12 | Melanoma | 4517 |
| GLLGDNQIV | HLA-B13:02 | MAGEA12 | Melanoma | 4518 |
| LVQENYLEY | HLA-B46:01 | MAGEA2; MAGEA12 | Melanoma | 4519 |
| SVIRNFQDF | HLA-B46:01 | MAGEA12 | Melanoma | 4520 |
| FQVALSRKM | HLA-B46:01 | MAGEA12 | Melanoma | 4521 |
| ISYPPLHEW | HLA-B46:01 | MAGEA12 | Melanoma | 4522 |
| VIFSKASEY | HLA0B46:01 | MAGEA2; MAGEA12 | Melanoma | 4523 |
| ISGGPHISY | HLA-B46:01 | MAGEA12 | Melanoma | 4524 |
| KMAELVHFL | HLA-C01:02 | MAGEA12 | Melanoma | 4525 |
| HSPQGASTL | HLA-C01:02 | MAGEA12 | Melanoma | 4526 |
| IVPKTGLLI | HLA-C01:02 | MAGEA12 | Melanoma | 4527 |
| TLPTTINYTL | HLA-C01:02 | MAGEA12 | Melanoma | 4528 |
| EGPSTFPDL | HLA-C01:02 | MAGEA12 | Melanoma | 4529 |
| SVFAHPRKL | HLA-C03:04 | MAGEA2; MAGEA12 | Melanoma | 4530 |
| FQVALSRKM | HLA-C03:04 | MAGEA12 | Melanoma | 4531 |
| HSPQGASTL | HLA-C03:04 | MAGEA12 | Melanoma | 4532 |
| ISYPPLHEW | HLA-C03:04 | MAGEA12 | Melanoma | 4533 |
| FAHPRKLL | HLA-C03:04 | MAGEA2; MAGEA12 | Melanoma | 4534 |
| KASEYLQL | HLA-C03:04 | MAGEA2; MAGEA12 | Melanoma | 4535 |
| FQDFFPVIF | HLA-C04:01 | MAGEA12 | Melanoma | 4536 |
| IFSKASEYL | HLA-C04:01 | MAGEA2; MAGEA12 | Melanoma | 4537 |
| TFPDLETSF | HLA-C04:01 | MAGEA12 | Melanoma | 4538 |
| KMAELVHFL | HLA-C04:01 | MAGEA12 | Melanoma | 4539 |
| IWEELSVL | HLA-C04:01 | MAGEA12 | Melanoma | 4540 |
| VRIGHLYIL | HLA-C07:01 | MAGEA12 | Melanoma | 4541 |
| SVFAHPRKL | HLA-C07:01 | MAGEA2; MAGEA12 | Melanoma | 4542 |
| SVFAHPRKLL | HLA-C07:01 | MAGEA2; MAGEA12 | Melanoma | 4543 |
| KMAELVHFL | HLA-C07:01 | MAGEA12 | Melanoma | 4544 |
| KIWEELSVL | HLA-C07:01 | MAGEA12 | Melanoma | 4545 |
| SGGPHISYP | HLA-C07:01 | MAGEA12 | Melanoma | 4546 |
| VRIGHLYIL | HLA-C07:02 | MAGEA12 | Melanoma | 4547 |
| SVFAHPRKL | HLA-C07:02 | MAGEA2; MAGEA12 | Melanoma | 4548 |
| SYVKVLHHL | HLA-C07:02 | MAGEA12 | Melanoma | 4549 |
| SYPPLHEWAF | HLA-C07:02 | MAGEA12 | Melanoma | 4550 |
| LMQDLVQENY | HLA-A01:01 | MAGEA2 | Melanoma | 4551 |
| MQDLVQENY | HLA-A01:01 | MAGEA2 | Melanoma | 4552 |
| ASSFSTTINY | HLA-A01:01 | MAGEA2 | Melanoma | 4553 |
| VVEVVPISHLY | HLA-A01:01 | MAGEA2 | Melanoma | 4554 |
| MVELVHFLLLKY | HLA-A01:01 | MAGEA2 | Melanoma | 4555 |
| KMVELVHFL | HLA-A02:01 | MAGEAZ | Melanoma | 4556 |
| KMVELVHFLL | HLA-A02:01 | MAGEA2 | Melanoma | 4557 |
| RKMVELVHFL | HLA-A02:01 | MAGEA2 | Melanoma | 4558 |
| KIWEELSML | HLA-A02:01 | MAGEA2 | Melanoma | 4559 |
| FLWGPRALI | HLA-A02:01 | MAGEA2 | Melanoma | 4560 |
| ALIETSYVKV | HLA-A02:01 | MAGEA2 | Melanoma | 4561 |
| TLVEVTLGEV | HLA-A02:01 | MAGEA2 | Melanoma | 4562 |
| KMVELVHFLLL | HLA-A02:01 | MAGEA2 | Melanoma | 4563 |
| LLMQDLVQENYL | HLA-A02:01 | MAGEA2 | Melanoma | 4564 |
| ALIETSYV | HLA-A02:01 | MAGEA2 | Melanoma | 4565 |
| GLLGDNQV | HLA-A02:01 | MAGEA2 | Melanoma | 4566 |
| GLLGDNQVM | HLA-A02:01 | MAGEA2 | Melanoma | 4567 |
| TLGEVPAA | HLA-A02:01 | MAGEA2 | Melanoma | 4568 |
| VELVHFLLLK | HLA-A03:01 | MAGEA2 | Melanoma | 4569 |
| KMVELVHFLLLK | HLA-A03:01 | MAGEA2 | Melanoma | 4570 |
| LLGDNQVMPK | HLA-A03:01 | MAGEA2 | Melanoma | 4571 |
| GLLGDNQVMPK | HLA-A03:01 | MAGEA2 | Melanoma | 4572 |
| SSPSTTINY | HLA-A03:01 | MAGEA2 | Melanoma | 4573 |
| TTINYTLWR | HLA-A11:01 | MAGEA2 | Melanoma | 4574 |
| STTINYTLWR | HLA-A11:01 | MAGEA2 | Melanoma | 4575 |
| ALIETSYVK | HLA-A11:01 | MAGEA2 | Melanoma | 4576 |
| SSESTTINY | HLA-ALI:01 | MAGEA2 | Melanoma | 4577 |
| SYVKVLHHTL | HLA-A24:02 | MAGEA2 | Melanoma | 4578 |
| TWEELSMLEVF | HLA-A24:02 | MAGEA2 | Melanoma | 4579 |
| SYVKVLHHTLKI | HLA-A24:02 | MAGEA2 | Melanoma | 4580 |
| MFPDLESEF | HLA-A24:02 | MAGEA2 | Melanoma | 4581 |
| VMPKTGLLI | HLA-A24:02 | MAGEA2 | Melanoma | 4582 |
| KYRAREPVTK | HLA-A30:01 | MAGEA2 | Melanoma | 4583 |
| RAREPVTKA | HLA-A30:01 | MAGEA2 | Melanoma | 4584 |
| RAREPVTK | HLA-A30:01 | MAGEA2 | Melanoma | 4585 |
| SSFSTTINY | HLA-A30:01 | MAGEA2 | Melanoma | 4586 |
| TTINYTLWR | HLA-A33:03 | MAGEA2 | Melanoma | 4587 |
| HISYPPLHER | HLA-A33:03 | MAGEA2 | Melanoma | 4588 |
| SMLEVFEGR | HLA-A33:03 | MAGEA2 | Melanoma | 4589 |
| ISYPPLHER | HLA-A33:03 | MAGEA2 | Melanoma | 4590 |
| EFQAAISR | HLA-A33:03 | MAGEA2 | Melanoma | 4591 |
| HPRKLLMQDL | HLA-B07:02 | MAGEA2 | Melanoma | 4592 |
| VPISHLYIL | HLA-B07:02 | MAGEA2 | Melanoma | 4593 |
| MPKTGLLI | HLA-B07:02 | MAGEA2 | Melanoma | 4594 |
| SPQGASSF | HLA-B07:02 | MAGEA2 | Melanoma | 4595 |
| YPPLHERAL | HLA-B07:02 | MAGEA2 | Melanoma | 4596 |
| YVKVLHHTL | HLA-B08:01 | MAGEA2 | Melanoma | 4597 |
| LLKYRAREPV | HLA-B08:01 | MAGEA2 | Melanoma | 4598 |
| FAHPRKLLM | HLA-B08:01 | MAGEA2 | Melanoma | 4599 |
| AISRKMVEL | HLA-B08:01 | MAGEA2 | Melanoma | 4600 |
| YEFLWGPRALI | HLA-B13:02 | MAGEA2 | Melanoma | 4601 |
| CYEFLWGPRALI | HLA-B13:02 | MAGEA2 | Melanoma | 4602 |
| IEVVEVVPI | HLA-B13:02 | MAGEA2 | Melanoma | 4603 |
| KVLHHTLKI | HLA-B13:02 | MAGEA2 | Melanoma | 4604 |
| RQSDEGSSN | HLA-B13:02 | MAGEA2 | Melanoma | 4605 |
| VLHHTLKI | HLA-B13:02 | MAGEA2 | Melanoma | 4606 |
| FAHPRKLLM | HLA-B46:01 | MAGEA2 | Melanoma | 4607 |
| FQAAISRKM | HLA-B46:01 | MAGEA2 | Melanoma | 4608 |
| SSFSTTINY | HLA-B46:01 | MAGEA2 | Melanoma | 4609 |
| ISYPPLHER | HLA-B46:01 | MAGEA2 | Melanoma | 4610 |
| IGGEPHISY | HLA-B46:01 | MAGEA2 | Melanoma | 4611 |
| FSTTINYTL | HLA-C01:02 | MAGEA2 | Melanoma | 4612 |
| FAHPRKLLM | HLA-C01:02 | MAGEA2 | Melanoma | 4613 |
| VMPKTGLLI | HLA-C01:02 | MAGEA2 | Melanoma | 4614 |
| HSPQGASSF | HLA-C01:02 | MAGEA2 | Melanoma | 4615 |
| YPPLHERAL | HLA-C01:02 | MAGEA2 | Melanoma | 4616 |
| VVPISHLYI | HLA-C01:02 | MAGEA2 | Melanoma | 4617 |
| FAHPRKLLM | HLA-C03:04 | MAGEA2 | Melanoma | 4618 |
| FSTTINYTL | HLA-C03:04 | MAGEA2 | Melanoma | 4619 |
| FQAAISRKM | HLA-C03:04 | MAGEA2 | Melanoma | 4620 |
| AAISRKMVEL | HLA-C03:04 | MAGEA2 | Melanoma | 4621 |
| MFPDLESEF | HLA-C04:01 | MAGEA2 | Melanoma | 4622 |
| CQDFFPVIF | HLA-C04:01 | MAGEA2 | Melanoma | 4623 |
| FAHPRKLLM | HLA-C04:01 | MAGEA2 | Melanoma | 4624 |
| TWEELSML | HLA-C04:01 | MAGEA2 | Melanoma | 4625 |
| FAHPRKLLM | HLA-C07:01 | MAGEA2 | Melanoma | 4626 |
| FQAAISRKM | HLA-C07:01 | MAGEA2 | Melanoma | 4627 |
| FSTTINYTL | HLA-C07:01 | MAGEA2 | Melanoma | 4628 |
| SSFSTTINY | HLA-C07:01 | MAGEA2 | Melanoma | 4629 |
| ARGEALGL | HLA-C07:01 | MAGEA2 | Melanoma | 4630 |
| LEVFEGRED | HLA-C07:01 | MAGEA2 | Melanoma | 4631 |
| FAHPRKLLM | HLA-C07:02 | MAGEA2 | Melanoma | 4632 |
| MFPDLESEF | HLA-C07:02 | MAGEA2 | Melanoma | 4633 |
| FQAAISRKM | HLA-C07:02 | MAGEA2 | Melanoma | 4634 |
| SYPPLHERAL | HLA-C07:02 | MAGEA2 | Melanoma | 4635 |
| ARGEALGL | HLA-C07:02 | MAGEA2 | Melanoma | 4636 |
| SYPPLHER | HLA-C07:02 | MAGEA2 | Melanoma | 4637 |
| EVDPASNTY | HLA-A01:01 | MAGEA4 | Lung squam | 4638 |
| YTLVTCLGLSY | HLA-A01:01 | MAGEA4 | Lung squam, | 4639 |
| KEVDPASNTY | HLA-A01:01 | IMAGEA4 | Lung squam | 4640 |
| VTCLGLSY | HLA-A01:01 | MAGEA2; | Lung squam.; Melanoma | 4641 |
| | | MAGEA12; MAGEA4 | | |
| MLERVIKNY | HLA-A01:01 | MAGEA4 | Lung squam. | 4642 |
| KVLEHVVRV | HLA-A02:01 | MAGEA4 | Lung squam. | 4643 |
| ALLEEEEGV | HLA-A02:01 | MAGEA4 | Lung squam. | 4644 |
| FLWGPRALA | HLA-A02:01 | MAGEA4 | Lung squam | 4645 |
| MIFGIDVKEV | HLA-A02:01 | MAGEA4 | Lung squam | 4646 |
| ALAETSYVKV | HLA-A02:01 | MAGEA4 | Lung squam. | 4647 |
| KVDELAHFL | HLA-A02:01 | MAGEA4 | Lung squam | 4648 |
| FLWGPRALAET | HLA-A02:01 | MAGEA4 | Lung squam. | 4649 |
| ALAETSYV | HLA-A02:01 | IMAGEA4 | Lung squam. | 4650 |
| SLKMIFGIDV | HLA-A02:01 | MAGEA4 | Lung squam. | 4651 |
| ALSNKVDEL | HLA-A02:01 | MAGEA4 | Lung squam. | 4652 |
| GVYDGREHTV | HLA-A02:01 | MAGEA4 | Lung squam. | 4653 |
| PLVPGTLEEV | HLA-A02:01 | MAGEA4 | Lung squam. | 4654 |
| FLWGPRAL | HLA-A02:01 | MAGEA2; | Lung squam.; Melanoma | 4655 |
| | | MAGEA12; MAGEA4 | | |
| SLFREALSNK | HLA-A03:01 | MAGEA4 | Lung squam. | 4656 |
| KVDELAHFLLRK | HLA-A03:01 | MAGEA4 | Lung squam. | 4657 |
| MLERVIKNYK | HLA-A03:01 | MAGEA4 | Lung squam. | 4658 |
| RCFPVIFGK | HLA-A03:01 | MAGEA4 | Lung squam | 4659 |
| GLLGNNQIFPK | HLA-A03:01 | MAGEA4 | Lung squam. | 4660 |
| ELAHFLLRK | HLA-A03:01 | MAGEA4 | Lung squam. | 4661 |
| TTISFTCWR | HLA-A11:01 | MAGEA4 | Lung squam. | 4662 |
| SLFREALSNK | HLA-A11:01 | MAGEA4 | Lung squam. | 4663 |
| ALAETSYVK | HLA-A11:01 | MAGEA4 | Lung squam | 4664 |
| RCFPVIFGK | HLA-A11:01 | MAGEA4 | Lung squam | 4665 |
| GVMGVYDGR | HLA-A11:01 | MAGEA4 | Lung squam. | 4666 |
| NYKRCFPVI | HLA-A24:02 | MAGEA4 | Lung squam. | 4667 |
| NYKRCFPVIF | HLA-A24:02 | MAGEA4 | Lung squam. | 4668 |
| SYVKVLEHV | HLA-A24:02 | MAGEA4 | Lung squam. | 4669 |
| VYGEPRKLL | HLA-A24:02 | MAGEA4 | Lung squam. | 4670 |
| IFPKTGLLI | HLA-A24:02 | MAGEA4 | Lung squam. | 4671 |
| RVRIAYPSL | HLA-A30:01 | MAGEA4 | Lung squam. | 4672 |
| KYRAKELVTK | HLA-A30:01 | MAGEA4 | Lung squam. | 4673 |
| RVRIAYPSLREA | HLA-A30:01 | MAGEA4 | Lung squam. | 4674 |
| RCFPVIFGK | HLA-A30:01 | MAGEA4 | Lung squam. | 4675 |
| KVLEHVVRV | HLA-A30:01 | MAGEA4 | Lung squam. | 4676 |
| TTISFTCWR | HLA-A33:03 | MAGEA4 | Lung squam. | 4677 |
| LAHFLLRKYR | HLA-A33:03 | MAGEA4 | Lung squam. | 4678 |
| PTTISFTCWR | HLA-A33:03 | MAGEA4 | Lung squam. | 4679 |
| ELAHFLLR | HLA-A33:03 | MAGEA4 | Lung squam | 4680 |
| DELAHFLLR | HLA-A33:03 | MAGEA4 | Lung squam | 4681 |
| YPSLREAAL | HLA-B07:02 | MAGEA4 | Lung squam. | 4682 |
| RVRIAYPSL | HLA-B07:02 | MAGEA4 | Lung squam. | 4683 |
| YPSLREAALL | HLA-B07:02 | MAGEA4 | Lung squam | 4684 |
| SPQGASAL | HLA-B07:02 | MAGEA4 | Lung squam. | 4685 |
| SPLVPGTL | HLA-B07:02 | MAGEA4 | Lung squam. | 4686 |
| FLLRKYRAKEL | HLA-B08:01 | MAGEA4 | Lung squam. | 4687 |
| LLRKYRAKEL | HLA-B08:01 | MAGEA4 | Lung squam | 4688 |
| YPSLREAAL | HLA-B08:01 | MAGEA4 | Lung squam. | 4689 |
| ELVTKAEML | HLA-B08:01 | MAGEA4 | Lung squam | 4690 |
| TGLLIVL | HLA-B08:01 | MAGEA2: | Lung squam.; Melanoma | 4691 |
| | | MAGEA12; MAGEA4 | | |
| QIFPKTGL | HLA-B08:01 | MAGEA4 | Lung squam. | 4692 |
| SESLKMIFGI | HLA-B13:02 | MAGEA4 | Lung squam. | 4693 |
| YEFLWGPRAL | HLA-B13:02 | MAGEA2: | Lung squam.; Melanoma | 4694 |
| | | MAGEA12; MAGEA4 | | |
| YEFLWGPRALA | HLA-B13:02 | MAGEA4 | Lung squam. | 4695 |
| GVYDGREHTV | HLA-B13:02 | MAGEA4 | Lung squam | 4696 |
| KVLEHVVRV | HLA-B13:02 | MAGEA4 | Lung squam. | 4697 |
| ALLEEEEGV | HLA-B13:02 | MAGEA4 | Lung squam. | 4698 |
| SALPTTISF | HLA-B46:01 | MAGEA4 | Lung squam | 4699 |
| AAVSSSSPL | HLA-B46:01 | MAGEA4 | Lung squam | 4700 |
| LVTCLGLSY | HLA-B46:01 | MAGEA2: | Lung squam.; Melanoma | 4701 |
| | | MAGEA12; MAGEA4 | | |
| VIKNYKRCF | HLA-B46:01 | MAGEA4 | Lung squam. | 4702 |
| TSYVKVLEH | HLA-B46:01 | MAGEA4 | Lung squam | 4703 |
| KVDELAHFL | HLA-C01:02 | MAGEA4 | Lung squam | 4704 |
| SSPLVPGTL | HLA-C01:02 | MAGEA4 | Lung squam. | 4705 |
| SALPTTISF | HLA-C01:02 | MAGEA4 | Lung squam. | 4706 |
| QSPQGASAL | HLA-C01:02 | MAGEA4 | Lung squam | 4707 |
| TSPDAESL | HLA-C01:02 | MAGEA4 | Lung squam | 4708 |
| AAVSSSSPL | HLA-C03:04 | MAGEA4 | Lung squam, | 4709 |
| SALPTTISF | HLA-C03:04 | MAGEA4 | Lung squam. | 4710 |
| RALAETSYV | HLA-C03:04 | MAGEA4 | Lung squam. | 4711 |
| FLWGPRAL | HLA-C03:04 | MAGEA2; | Lung squam.; Melanoma | 4712 |
| | | MAGEA12; MAGEA4 | | |
| KVDELAHFL | HLA-C04:01 | MAGEA4 | Lung squam. | 4713 |
| IFPKTGLLI | HLA-C04:01 | MAGEA4 | Lung squam. | 4714 |
| VYDGREHTV | HLA-C04:01 | MAGEA4 | Lung squam | 4715 |
| KVDELAHF | HLA-C04:01 | MAGEA4 | Lung squam | 4716 |
| LRKYRAKEL | HLA-C07:01 | MAGEA4 | Lung squam. | 4717 |
| VRVNARVRI | HLA-C07:01 | MAGEA4 | Lung squam | 4718 |
| FREALSNKV | HLA-C07:01 | MAGEA4 | Lung squam | 4719 |
| KTGLLIIVL | HLA-C07:01 | MAGEA2; | Lung squam. | 4720 |
| | | MAGEA12; MAGEA4 | Melanoma | |
| RCFPVIFGK | HLA-C07:01 | MAGEA4 | Lung squam. | 4721 |
| TVYGEPRKL | HLA-C07:01 | MAGEA4 | Lung squam | 4722 |
| YKRCFPVIF | HLA-C07:02 | MAGEA4 | Lung squam. | 4723 |
| LRKYRAKEL | HLA-C07:02 | MAGEA4 | Lung squam. | 4724 |
| VRVNARVRI | HLA-C07:02 | MAGEA4 | Lung squam | 4725 |
| IFPKTGLLI | HLA-C07:02 | MAGEA4 | Lung squam. | 4726 |
| VYGEPRKI | HLA-C07:02 | MAGEA4 | Lung squam. | 4727 |
| VRIAYPSL | HLA-C07:02 | MAGEA4 | Lung squam, | 4728 |
| ASSASSTLY | HLA-A01:01 | MAGEC2 | Melanoma | 4729 |
| LVEFLLLKY | HLA-A01:01 | MAGEC2 | Melanoma | 4730 |
| EASSASSTLY | HLA-A01:01 | MAGEC2 | Melanoma | 4731 |
| VAELVEFLLLKY | HLA-A01:01 | MAGEC2 | Melanoma | 4732 |
| FLAKLNNTV | HLA-A02:01 | MAGEC2 | Melanoma | 4733 |
| VIWEVLNAV | HLA-A02:01 | MAGEC2 | Melanoma | 4734 |
| LLFGLALIEV | HLA-A02:01 | MAGEC2 | Melanoma | 4735 |
| FMELLFGL | HLA-A02:01 | MAGEC2 | Melanoma | 4736 |
| FLLLKYEAEEPV | HLA-A02:01 | MAGEC2 | Melanoma | 4737 |
| YTLDEKVAEL | HLA-A02:01 | MAGEC2 | Melanoma | 4738 |
| VMASESLSV | HLA-A02:01 | MAGEC2 | Melanoma | 4739 |
| KVLEFLAKL | HLA-A02:01 | MAGEC2 | Melanoma | 4740 |
| KVAELVEFL | HLA-A02:01 | MAGEC2 | Melanoma | 4741 |
| ILDEKVAEL | HLA-A02:01 | MAGEC2 | Melanoma | 4742 |
| SLLIILSV | HLA-A02:01 | MAGEC2 | Melanoma | 4743 |
| ALKDVEERV | HLA-A02:01 | MAGEC2 | Melanoma | 4744 |
| TLDEKVAELV | HLA-A02:01 | MAGEC2 | Melanoma | 4745 |
| ILGGPEEEEV | HLA-A02:01 | MAGEC2 | Melanoma | 4746 |
| MLMIVIKYK | HLA-A03:01 | MAGEC2 | Melanoma | 4747 |
| SSFTYTLDEK | HLA-A03:01 | MAGEC2 | Melanoma | 4748 |
| EMLMIVIKYK | HLA-A03:01 | MAGEC2 | Melanoma | 4749 |
| KDYFPVILK | HLA-A03:01 | MAGEC2 | Melanoma | 4750 |
| IILSVIFIK | HLA-A03:01 | MAGEC2 | Melanoma | 4751 |
| SSFTYTLDEK | HLA-ALI:01 | MAGEC2 | Melanoma | 4752 |
| VPSSFPSWYK | HLA-A11:01 | MAGEC2 | Melanoma | 4753 |
| IILSVIFIK | HLA-A11:01 | MAGEC2 | Melanoma | 4754 |
| SSESEESSSQK | HLA-A11:01 | MAGEC2 | Melanoma | 4755 |
| LYLVFSPSSF | HLA-A24:02 | MAGEC2 | Melanoma | 4756 |
| KYKDYFPVI | HLA-A24:02 | MAGEC2 | Melanoma | 4757 |
| KYKDYFPVIL | HLA-A24:02 | MAGEC2 | Melanoma | 4758 |
| VYGEPRELL | HLA-A24:02 | MAGEC2 | Melanoma | 4759 |
| RAHSESIKK | HLA-A30:01 | MAGEC2 | Melanoma | 4760 |
| KYKDYFPVI | HLA-A30:01 | MAGEC2 | Melanoma | 4761 |
| KYKDYFPVILK | HLA-A30:01 | MAGEC2 | Melanoma | 4762 |
| KDYFPVILK | HLA-A30:01 | MAGEC2 | Melanoma | 4763 |
| NAVGVYAGR | HLA-A33:03 | MAGEC2 | Melanoma | 4764 |
| DYFPVILKR | HLA-A33:03 | MAGEC2 | Melanoma | 4765 |
| WVQGHYLEYR | HLA-A33:03 | MAGEC2 | Melanoma | 4766 |
| DYFPVILKRAR | HLA-A33:03 | MAGEC2 | Melanoma | 4767 |
| GPRAHSESI | HLA-B07:02 | MAGEC2 | Melanoma | 4768 |
| FPSWYKDAL | HLA-B07:02 | MAGEC2 | Melanoma | 4769 |
| WGPRAHSESI | HLA-B07:02 | MAGEC2 | Melanoma | 4770 |
| SPSSFSTSSSL | HLA-B07:02 | MAGEC2 | Melanoma | 4771 |
| VPSGVIPNL | HLA-B07:02 | MAGEC2 | Melanoma | 4772 |
| MPPVPGVPF | HLA-B07:02 | MAGEC2 | Melanoma | 4773 |
| SIKKKVLEF | HLA-B08:01 | MAGEC2 | Melanoma | 4774 |
| LKRAREFMEL | HLA-B08:01 | MAGEC2 | Melanoma | 4775 |
| SIKKKVLEFL | HLA-B08:01 | MAGEC2 | Melanoma | 4776 |
| ESIKKKVL | HLA-B08:01 | MAGEC2 | Melanoma | 4777 |
| TLDEKVAEL | HLA-B08:01 | MAGEC2 | Melanoma | 4778 |
| MELLFGLALI | HLA-B13:02 | MAGEC2 | Melanoma | 4779 |
| REFMELLFGL | HLA-B13:02 | MAGEC2 | Melanoma | 4780 |
| MPENSLLIII | HLA-B13:02 | MAGEC2 | Melanoma | 4781 |
| SLLIIILSV | HLA-B13:02 | MAGEC2 | Melanoma | 4782 |
| ALKDVEERV | HLA-B13:02 | MAGEC2 | Melanoma | 4783 |
| ASEEVIWEV | HLA-B13:02 | MAGEC2 | Melanoma | 4784 |
| MASESLSVM | HLA-B46:01 | MAGEC2 | Melanoma | 4785 |
| YLVFSPSSF | HLA-B46:01 | MAGEC2 | Melanoma | 4786 |
| FVYGEPREL | HLA-B46:01 | MAGEC2 | Melanoma | 4787 |
| FSTSSSLIL | HLA-B46:01 | MAGEC2 | Melanoma | 4788 |
| HSSPPYYEF | HLA-B46:01 | MAGEC2 | Melanoma | 4789 |
| SIKKKVLEF | HLA-B46:01 | MAGEC2 | Melanoma | 4790 |
| SVMSSNVSF | HLA-B46:01 | MAGEC2 | Melanoma | 4791 |
| FSTSSSLIL | HLA-C01:02 | MAGEC2 | Melanoma | 4792 |
| SSPPYYEFL | HLA-C01:02 | MAGEC2 | Melanoma | 4793 |
| SSASSTLYL | HLA-C01:02 | MAGEC2 | Melanoma | 4794 |
| FSPSSFSTS | HLA-C01:02 | MAGEC2 | Melanoma | 4795 |
| VGPDHFCVF | HLA-C01:02 | MAGEC2 | Melanoma | 4796 |
| MASESLSVM | HLA-C03:04 | MAGEC2 | Melanoma | 4797 |
| FSTSSSLIL | HLA-C03:04 | MAGEC2 | Melanoma | 4798 |
| FVYGEPREL | HLA-C03:04 | MAGEC2 | Melanoma | 4799 |
| FANTVGLTD | HLA-C03:04 | MAGEC2 | Melanoma | 4800 |
| YKDYFPVIL | HLA-C04:01 | MAGEC2 | Melanoma | 4801 |
| FSTSSSLIL | HLA-C04:01 | MAGEC2 | Melanoma | 4802 |
| HSSPPYYEF | HLA-C04:01 | MAGEC2 | Melanoma | 4803 |
| TLDEKVAEL | HLA-C04:01 | MAGEC2 | Melanoma | 4804 |
| HFCVFANTV | HLA-C04:01 | MAGEC2 | Melanoma | 4805 |
| FVYGEPREL | HLA-C07:01 | MAGEC2 | Melanoma | 4806 |
| KRAREFMEL | HLA-C07:01 | MAGEC2 | Melanoma | 4807 |
| YKDYFPVIL | HLA-C07:01 | MAGEC2 | Melanoma | 4808 |
| HSSPPYYEF | HLA-C07:01 | MAGEC2 | Melanoma | 4809 |
| SSPPYYEF | HLA-C07:01 | MAGEC2 | Melanoma | 4810 |
| KRAREFMEL | HLA-C07:02 | MAGEC2 | Melanoma | 4811 |
| KYKDYFPVI | HLA-C07:02 | MAGEC2 | Melanoma | 4812 |
| FVYGEPREL | HLA-C07:02 | MAGEC2 | Melanoma | 4813 |
| VYGEPREL | HLA-C07:02 | MAGEC2 | Melanoma | 4814 |
| YKDYFPVIL | HLA-C07:02 | MAGEC2 | Melanoma | 4815 |
| HSSPPYYEF | HLA-C07:02 | MAGEC2 | Melanoma | 4816 |
| ISDMLGSLY | HLA-A01:01 | MC2R | Adrenal Gland | 4817 |
| AISDMLGSLY | HLA-A01:01 | MC2R | Adrenal Gland | 4818 |
| LAISDMLGSLY | HLA-A01:01 | MC2R | Adrenal Gland | 4819 |
| ITIFHALRY | HLA-A01:01 | MC2R | Adrenal Gland | 4820 |
| ISDMLGSLYK | HLA-A01:01 | MC2R | Adrenal Gland | 4821 |
| FIFCWAPFV | HLA-A02:01 | MC2R | Adrenal Gland | 4822 |
| SLLGSIFSL | HLA-A02:01 | MC2R | Adrenal Gland | 4823 |
| FIFCWAPFVL | HLA-A02:01 | MC2R | Adrenal Gland | 4824 |
| FVLSLLGSIFSL | HLA-A02:01 | MC2R | Adrenal Gland | 4825 |
| VFIFCWAPFV | HLA-A02:01 | MC2R | Adrenal Gland | 4826 |
| SLFPLMLVFI | HLA-A02:01 | MC2R | Adrenal Gland | 4827 |
| LSLLGSIFSL | HLA-A02:01 | MC2R | Adrenal Gland | 4828 |
| FIYAFRSPEL | HLA-A02:01 | MC2R | Adrenal Gland | 4829 |
| LQAPMYFFI | HLA-A02:01 | MC2R | Adrenal Gland | 4830 |
| SLFPLMLV | HLA-A02:01 | MC2R | Adrenal Gland | 4831 |
| GVLENLIVL | HLA-A02:01 | MC2R | Adrenal Gland | 4832 |
| VLENLIVLL | HLA-A02:01 | MC2R | Adrenal Gland | 4833 |
| SLYKILENI | HLA-A02:01 | MC2R | Adrenal Gland | 4834 |
| SLFQVNGML | HLA-A02:01 | MC2R | Adrenal Gland | 4835 |
| VLPEEIFFT | HLA-A02:01 | MC2R | Adrenal Gland | 4836 |
| ILRNMGYLK | HLA-A03:01 | MC2R | Adrenal Gland | 4837 |
| IILRNMGYLK | HLA-A03:01 | MC2R | Adrenal Gland | 4838 |
| ISDMLGSLYK | HLA-A03:01 | MC2R | Adrenal Gland | 4839 |
| AISDMLGSLYK | HLA-A03:01 | MC2R | Adrenal Gland | 4840 |
| AVIDPFIYA | HLA-A03:01 | MC2R | Adrenal Gland | 4841 |
| VLLAVFKNK | HLA-A03:01 | MC2R | Adrenal Gland | 4842 |
| ISDMLGSLYK | HLA-A11:01 | MC2R | Adrenal Gland | 4843 |
| STLPRANMK | HLA-A11:01 | MC2R | Adrenal Gland | 4844 |
| AISDMLGSLYK | HLA-A11:01 | MC2R | Adrenal Gland | 4845 |
| AVIDPFIYAFR | HLA-A11:01 | MC2R | Adrenal Gland | 4846 |
| AVIDPFIYA | HLA-A11:01 | MC2R | Adrenal Gland | 4847 |
| RYITIFHAL | HLA-A24:02 | MC2R | Adrenal Gland | 4848 |
| VFIFCWAPF | HLA-A24:02 | MC2R | Adrenal Gland | 4849 |
| PYCACYMSLF | HLA-A24:02 | MC2R | Adrenal Gland | 4850 |
| IYAFRSPEL | HLA-A24:02 | MC2R | Adrenal Gland | 4851 |
| VVLTVIWTF | HLA-A24:02 | MC2R | Adrenal Gland | 4852 |
| ILRNMGYLK | HLA-A30:01 | MC2R | Adrenal Gland | 4853 |
| RSHTRKIST | HLA-A30:01 | MC2R | Adrenal Gland | 4854 |
| HTRKISTLP | HLA-A30:01 | MC2R | Adrenal Gland | 4855 |
| AVIDPFIYA | HLA-A30:01 | MC2R | Adrenal Gland | 4856 |
| VLLAVFKNK | HLA-A30:01 | MC2R | Adrenal Gland | 4857 |
| RYTTIFHAL | HLA-A30:01 | MC2R | Adrenal Gland | 4858 |
| YITIFHALR | HLA-A33:03 | MC2R | Adrenal Gland | 4859 |
| MFLLARSHTR | HLA-A33:03 | MC2R | Adrenal Gland | 4860 |
| RYITIFHALR | HLA-A33:03 | MC2R | Adrenal Gland | 4861 |
| HTRKISTLPR | HLA-A33:03 | MC2R | Adrenal Gland | 4862 |
| DAFKKMIFCSR | HLA-A33:03 | MC2R | Adrenal Gland | 4863 |
| RYHSIVTMR | HLA-A33:03 | MC2R | Adrenal Gland | 4864 |
| ENILILR | HLA-A33:03 | MC2R | Adrenal Gland | 4865 |
| LPRANMKGAI | HLA-B07:02 | MC2R | Adrenal Gland | 4866 |
| APMYFFICSL | HLA-B07:02 | MC2R | Adrenal Gland | 4867 |
| LPRANMKGAITL | HLA-B07:02 | MC2R | Adrenal Gland | 4868 |
| VPTVITFTSL | HLA-B07:02 | MC2R | Adrenal Gland | 4869 |
| APFVLHVLL | HLA-B07:02 | MC2R | Adrenal Gland | 4870 |
| YLKPRGSF | HLA-B08:01 | MC2R | Adrenal Gland | 4871 |
| TMRRTVVVL | HLA-B08:01 | MC2R | Adrenal Gland | 4872 |
| HALRYHSI | HLA-B08:01 | MC2R | Adrenal Gland | 4873 |
| YITIFHAL | HLA-B08:01 | MC2R | Adrenal Gland | 4874 |
| DAFKKMIF | HLA-B08:01 | MC2R | Adrenal Gland | 4875 |
| TVITFTSI | HLA-B08:01 | MC2R | Adrenal Gland | 4876 |
| LQAPMYFFI | HLA-B13:02 | MC2R | Adrenal Gland | 4877 |
| EEIFFTISI | HLA-B13:02 | MC2R | Adrenal Gland | 4878 |
| SDMLGSLYKI | HLA-B13:02 | MC2R | Adrenal Gland | 4879 |
| SLYKILENI | HLA-B13:02 | MC2R | Adrenal Gland | 4880 |
| RRTVVVLTV | HLA-B13:02 | MC2R | Adrenal Gland | 4881 |
| FTISIVGVL | HLA-B46:01 | MC2R | Adrenal Gland | 4882 |
| FQVNGMILIM | HLA-B46:01 | MC2R | Adrenal Gland | 4883 |
| MTFCPSNPY | HLA-B46:01 | MC2R | Adrenal Gland | 4884 |
| VIDPFIYAF | HLA-B46:01 | MC2R | Adrenal Gland | 4885 |
| VLHVLLMTF | HLA-B46:01 | MC2R | Adrenal Gland | 4886 |
| YLKPRGSF | HLA-B46:01 | MC2R | Adrenal Gland | 4887 |
| IAADRYITI | HLA-C01:02 | MC2R | Adrenal Gland | 4888 |
| WAPFVLHVL | HLA-C01:02 | MC2R | Adrenal Gland | 4889 |
| ITFTSLFPL | HLA-C01:02 | MC2R | Adrenal Gland | 4890 |
| FTSLFPLML | HLA-C01:02 | MC2R | Adrenal Gland | 4891 |
| RSPELRDAF | HLA-C01:02 | MC2R | Adrenal Gland | 4892 |
| FCPSNPYCAC | HLA-C01:02 | MC2R | Adrenal Gland | 4893 |
| FTISIVGVL | HLA-C03:04 | MC2R | Adrenal Gland | 4894 |
| FSHHVPTVI | HLA-C03:04 | MC2R | Adrenal Gland | 4895 |
| IAADRYITI | HLA-C03:04 | MC2R | Adrenal Gland | 4896 |
| YAFRSPEL | HLA-C03:04 | MC2R | Adrenal Gland | 4897 |
| FIYAFRSPEL | HLA-C03:04 | MC2R | Adrenal Gland | 4898 |
| ISDMLGSLY | HLA-C04:01 | MC2R | Adrenal Gland | 4899 |
| LFQVNGMLI | HLA-C04:01 | MC2R | Adrenal Gland | 4900 |
| TFTSLFPLM | HLA-C04:01 | MC2R | Adrenal Gland | 4901 |
| LFPLMLVFI | HLA-C04:01 | MC2R | Adrenal Gland | 4902 |
| VIDPFIYAF | HLA-C04:01 | MC2R | Adrenal Gland | 4903 |
| IFCWAPFVL | HLA-C04:01 | MC2R | Adrenal Gland | 4904 |
| LRYHSIVTM | HLA-C07:01 | MC2R | Adrenal Gland | 4905 |
| RRTVVVLTV | HLA-C07:01 | MC2R | Adrenal Gland | 4906 |
| FHALRYHSI | HLA-C07:01 | MC2R | Adrenal Gland | 4907 |
| MRRTVVVL | HLA-C07:01 | MC2R | Adrenal Gland | 4908 |
| HHVPTVITF | HLA-C07:01 | MC2R | Adrenal Gland | 4909 |
| DRYITIFHA | HLA-C07:01 | MC2R | Adrenal Gland | 4910 |
| LRYHSIVTM | HLA-C07:02 | MC2R | Adrenal Gland | 4911 |
| LYAFRSPEL | HLA-C07:02 | MC2R | Adrenal Gland | 4912 |
| FHALRYHSI | HLA-C07:02 | MC2R | Adrenal Gland | 4913 |
| HHVPTVITF | HLA-C07:02 | MC2R | Adrenal Gland | 4914 |
| MRRTVVVL | HLA-C07:02 | MC2R | Adrenal Gland | 4915 |
| FSGNQVWRY | HLA-A01:01 | MMP13 | Head & neck | 4916 |
| WSDVTPLNF | HLA-A01:01 | MMP13 | Head & neck | 4917 |
| FAERYLRSYY | HLA-A01:01 | MMP13 | Head & neck | 4918 |
| LSEEDLQFAERY | HLA-A01:01 | MMP13 | Head & neck | 4919 |
| FLTKSFWPEL | HLA-A02:01 | MMP13 | Head & neck | 4920 |
| YLFFQRTHTV | HLA-A02:01 | MMP13 | Head & neck | 4492 |
| RLIEEDFPGI | HLA-A02:01 | MMP13 | Head & neck | 4922 |
| SLWSSWDYRI | HLA-A02:01 | MMP13 | Head & neck | 4923 |
| SLSLDAITSL | HLA-A02:01 | MMP13 | Head & neck | 4924 |
| MQSFFGLEV | HLA-A02:01 | MMP13 | Head & neck | 4925 |
| LMFPIYTYT | HLA-A02:01 | MMP13 | Head & neck | 4926 |
| KLDDNTLDV | HLA-A02:01 | MMP13 | Head & neck | 4927 |
| SLWSSWDYRLYL | HLA-A02:01 | MMP13 | Head & neck | 4928 |
| FKVWSDVTPL | HLA-A02:01 | MMP13 | Head & neck | 4929 |
| TLLFSGNQV | HLA-A02:01 | MMP13 | Head & neck | 4930 |
| RLHDGIADI | HLA-A02:01 | MMP13 | Head & neck | 4931 |
| SIWSNRIVRV | HLA-A02:01 | MMP13 | Head & neck | 4932 |
| GIGDKVDAV | HLA-A02:01 | MMP13 | Head & neck | 4933 |
| SLRGETMIFK | HLA-A03:01 | MMP13 | Head & neck | 4934 |
| LMFPIYTYTGK | HLA-A03:01 | MMP13 | Head & neck | 4935 |
| LIFIFRGRK | HLA-A03:01 | MMP13 | Head & neck | 4936 |
| KISELGLPK | HLA-A03:01 | MMP13 | Head & neck | 4937 |
| RVMPANSILWC | HLA-A03:01 | MMP13 | Head & neck | 4938 |
| KISELGLPK | HLA-A11:01 | MMP13 | Head & neck | 4939 |
| MIFKDRFFWR | HLA-A11:01 | MMP13 | Head & neck | 4940 |
| KSFWPELPNR | HLA-A11:01 | MMP13 | Head & neck | 4941 |
| SIWSNRIVR | HLA-A11:01 | MMP13 | Head & neck | 4942 |
| NVFPRTLKWSK | HLA-A11:01 | MMP13 | Head & neck | 4943 |
| IYFFNGPIQF | HLA-A24:02 | MMP13 | Head & neck | 4944 |
| YFFNGPIQF | HLA-A24:02 | MMP13 | Head & neck | 4945 |
| SWDYRLYLF | HLA-A24:02 | MMP13 | Head & neck | 4946 |
| VWSDVTPLNF | HLA-A24:02 | MMP13 | Head & neck | 4947 |
| RSYYHPINLA | HLA-A30:01 | MMP13 | Head & neck | 4948 |
| RSYYHPTNL | HLA-A30:01 | MMP13 | Head & neck | 4949 |
| RGRKFWALN | HLA-A30:01 | MMP13 | Head & neck | 4950 |
| LTKSFWPEL | HLA-A30:01 | MMP13 | Head & neck | 4951 |
| HAFPPGPNY | HLA-A30:01 | MMP13 | Head & neck | 4952 |
| SLRGETMIFK | HLA-A30:01 | MMP13 | Head & neck | 4953 |
| MIFKDRFFWR | HLA-A33:03 | MMP13 | Head & neck | 4954 |
| HIMDKDYPR | HLA-A33:03 | MMP13 | Head & neck | 4955 |
| IFKDRFFWR | HLA-A33:03 | MMP13 | Head & neck | 4956 |
| DLIFIFRGR | HLA-A33:03 | MMP13 | Head & neck | 4957 |
| DYRLYLFFQR | HLA-A33:03 | MMP13 | Head & neck | 4958 |
| EYSIWSNRIVR | HLA-A33:03 | MMP13 | Head & neck | 4959 |
| FPRTLKWSKM | HLA-B07:02 | MMP13 | Head & neck | 4960 |
| HPTNLAGIL | HLA-B07:02 | MMP13 | Head & neck | 4961 |
| RVMPANSIL | HLA-B07:02 | MMP13 | Head & neck | 4962 |
| YPFDGPSGL | HLA-B07:02 | MMP13 | Head & neck | 4963 |
| YPFDGPSGLL | HLA-B07:02 | MMP13 | Head & neck | 4964 |
| HPQQVDAEL | HLA-B07:02 | MMP13 | Head & neck | 4965 |
| FRGRKFWAL | HLA-B08:01 | MMP13 | Head & neck | 4966 |
| FIFRGRKFWAL | HLA-B08:01 | MMP13 | Head & neck | 4967 |
| WTHCRALPL | HLA-B08:01 | MMP13 | Head & neck | 4968 |
| YPKKISEL | HLA-B08:01 | MMP13 | Head & neck | 4969 |
| TLKWSKMNL | HLA-B08:01 | MMP13 | Head & neck | 4970 |
| EGYPKKISE | HLA-B08:01 | MMP13 | Head & neck | 4971 |
| REMQSFFGL | HLA-B13:02 | MMP13 | Head & neck | 4972 |
| ADIMISFGI | HLA-B13:02 | MMP13 | Head & neck | 4973 |
| FEYSIWSNRI | HLA-B13:02 | MMP13 | Head & neck | 4974 |
| RLHDGIADI | HLA-B13:02 | MMP13 | Head & neck | 4975 |
| GLPKEVKKI | HLA-B13:02 | MMP13 | Head & neck | 4976 |
| MQSFFGLEV | HLA-B13:02 | MMP13 | Head & neck | 4977 |
| YTYTGKSHF | HLA-B46:01 | MMP13 | Head & neck | 4978 |
| YFFNGPIQF | HLA-B46:01 | MMP13 | Head & neck | 4979 |
| WTHCRALPL | HLA-B46:01 | MMP13 | Head & neck | 4980 |
| HAFPPGPNY | HLA-B46:01 | MMP13 | Head & neck | 4981 |
| GIADIMISF | HLA-B46:01 | MMP13 | Head & neck | 4982 |
| ALMFPIYTY | HLA-B46:01 | MMP13 | Head & neck | 4983 |
| SSWDYRLYL | HLA-C01:02 | MMP13 | Head & neck | 4984 |
| RVMPANSIL | HLA-C01:02 | MMP13 | Head & neck | 4985 |
| RSYYHPTNL | HLA-C01:02 | MMP13 | Head & neck | 4986 |
| VTPLNFTRL | HLA-C01:02 | MMP13 | Head & neck | 4987 |
| YTPDMTHSEV | HLA-C01:02 | MMP13 | Head & neck | 4988 |
| VMPANSIL | HLA-C01:02 | MMP13 | Head & neck | 4989 |
| LSLDAITSI | HLA-C03:04 | MMP13 | Head & neck | 4990 |
| RVMPANSIL | HLA-C03:04 | MMP13 | Head & neck | 4991 |
| WTHCRALPL | HLA-C03:04 | MMP13 | Head & neck | 4992 |
| AAYEHPSHDL | HLA-C03:04 | MMP13 | Head & neck | 4993 |
| LSWTHCRAL | HLA-C03:04 | MMP13 | Head & neck | 4994 |
| RYDDTNHIM | HLA-C04:01 | MMP13 | Head & neck | 4995 |
| WRYDDTNHIM | HLA-C04:01 | MMP13 | Head & neck | 4996 |
| YPFDGPSGLL | HLA-C04:01 | MMP13 | Head & neck | 4997 |
| SWDYRLYLF | HLA-C04:01 | MMP13 | Head & neck | 4998 |
| FFNGPIQF | HLA-C04:01 | MMP13 | Head & neck | 4999 |
| WRYDDTNHI | HLA-C07:01 | MMP13 | Head & neck | 5000 |
| FRGRKFWAL | HLA-C07:01 | MMP13 | Head & neck | 5001 |
| YFFNGPIQF | HLA-C07:01 | MMP13 | Head & neck | 5002 |
| RSYYHPTNL | HLA-C07:01 | MMP13 | Head & neck | 5003 |
| SSWDYRLYL | HLA-C07:01 | MMP13 | Head & neck | 5004 |
| FNGPIQFEY | HLA-C07:01 | MMP13 | Head & neck | 5005 |
| YFFNGPIQF | HLA-C07:02 | MMP13 | Head & neck | 5006 |
| FRGRKFWAL | HLA-C07:02 | MMP13 | Head & neck | 5007 |
| LFFQRTHTV | HLA-C07:02 | MMP13 | Head & neck | 5008 |
| NRIDAAYEH | HLA-C07:02 | MMP13 | Head & neck | 5009 |
| GYPKKISEL | HLA-C07:02 | MMP13 | Head & neck | 5010 |
| PTDNQGTDV | HLA-A01:01 | PAGE5 | Melanoma | 5011 |
| PTDNQGTDVEAF | HLA-A01:01 | PAGE5 | Melanoma | 5012 |
| GTDVEAFQQELA | HLA-A01:01 | PAGE5 | Melanoma | 5013 |
| VLEAGEGQL | HLA-A01:01 | PAGE5 | Melanoma | 5014 |
| GTDVEAFQQ | HLA-A01:01 | PAGE5 | Melanoma | 5015 |
| FQQELALLKI | HLA-A02:01 | PAGE5 | Melanoma | 5016 |
| TLPTFDPTKV | HLA-A02:01 | PAGE5 | Melanoma | 5017 |
| FQQELALL | HLA-A02:01 | PAGE5 | Melanoma | 5018 |
| VLEAGEGQL | HLA-A02:01 | PAGE5 | Melanoma | 5019 |
| GTLPTFDPTKV | HLA-A02:01 | PAGE5 | Melanoma | 5020 |
| AFQQELALLKI | HLA-A02:01 | PAGE5 | Melanoma | 5021 |
| KVLEAGEGQL | HLA-A02:01 | PAGE5 | Melanoma | 5022 |
| EAFQQELALLKI | HLA-A02:01 | PAGE5 | Melanoma | 5023 |
| TLPTFDPTKVL | HLA-A02:01 | PAGE5 | Melanoma | 5024 |
| FQQELALLK | HLA-A02:01 | PAGE5 | Melanoma | 5025 |
| GWAGTREEV | HLA-A02:01 | PAGE5 | Melanoma | 5026 |
| IKNEGAPAV | HLA-A02:01 | PAGE5 | Melanoma | 5027 |
| AVQGTDVEA | HLA-A02:01 | PAGE5 | Melanoma | 5028 |
| ALLKIEDA | HLA-A02:01 | PAGE5 | Melanoma | 5029 |
| GTLPTFDPTK | HLA-A03:01 | PAGE5 | Melanoma | 5030 |
| AFQQELALLK | HLA-A03:01 | PAGE5 | Melanoma | 5031 |
| GIAPSGEIK | HLA-A03:01 | PAGE5 | Melanoma | 5032 |
| FQQELALLK | HLA-A03:01 | PAGE5 | Melanoma | 5033 |
| IVQQPTEEK | HLA-A03:01 | PAGE5 | Melanoma | 5034 |
| GTLPTFDPTK | HLA-A11:01 | PAGE5 | Melanoma | 5035 |
| GIAPSGEIK | HLA-A11:01 | PAGE5 | Melanoma | 5036 |
| IVQQPTEEK | HLA-A11:01 | PAGE5 | Melanoma | 5037 |
| FQQELALLK | HLA-A11:01 | PAGE5 | Melanoma | 5038 |
| AFQQELALL | HLA-A24:02 | PAGE5 | Melanoma | 5039 |
| VEAFQQELALL | HLA-A24:02 | PAGE5 | Melanoma | 5040 |
| EAFQQELALL | HLA-A24:02 | PAGE5 | Melanoma | 5041 |
| VREGTLPTF | HLA-A24:02 | PAGE5 | Melanoma | 5042 |
| VQGTDVEAF | HLA-A24:02 | PAGE5 | Melanoma | 5043 |
| GTLPTFDPTK | HLA-A30:01 | PAGE5 | Melanoma | 5044 |
| VTRSQSSER | HLA-A30:01 | PAGE5 | Melanoma | 5045 |
| SSQPVGPVI | HLA-A30:01 | PAGE5 | Melanoma | 5046 |
| PTFDPTKVL | HLA-A30:01 | PAGE5 | Melanoma | 5047 |
| GTREEVRDM | HLA-A30:01 | PAGE5 | Melanoma | 5048 |
| IVQQPTEEK | HLA-A30:01 | PAGE5 | Melanoma | 5049 |
| VTRSQSSER | HLA-A33:03 | PAGE5 | Melanoma | 5050 |
| EVRDMSEHVTR | HLA-A33:03 | PAGE5 | Melanoma | 5051 |
| MQAPWAGNR | HLA-A33:03 | PAGE5 | Melanoma | 5052 |
| DMSEHVTR | HLA-A33:03 | PAGE5 | Melanoma | 5053 |
| APAVQGTDV | HLA-B07:02 | PAGE5 | Melanoma | 5054 |
| LPTFDPTKVL | HLA-B07:02 | PAGE5 | Melanoma | 5055 |
| APWAGNRGWA | HLA-B07:02 | PAGE5 | Melanoma | 5056 |
| GPDVREGTL | HLA-B07:02 | PAGE5 | Melanoma | 5057 |
| WAGNRGWAG | HLA-B08:01 | PAGE5 | Melanoma | 5058 |
| EAFQQELAL | HLA-B08:01 | PAGE5 | Melanoma | 5059 |
| WAGNRGWAGT | HLA-B08:01 | PAGE5 | Melanoma | 5060 |
| LALLKIED | HLA-B08:01 | PAGE5 | Melanoma | 5061 |
| DPTKVLEA | HLA-B08:01 | PAGE5 | Melanoma | 5062 |
| ELALLKIED | HLA-B08:01 | PAGE5 | Melanoma | 5063 |
| FQQELALLKI | HLA-B13:02 | PAGE5 | Melanoma | 5064 |
| SSQPVGPVI | HLA-B13:02 | PAGE5 | Melanoma | 5065 |
| QQELALLKI | HLA-B13:02 | PAGE5 | Melanoma | 5066 |
| SQPVGPVIV | HLA-B13:02 | PAGE5 | Melanoma | 5067 |
| SSQPVGPVI | HLA-B46:01 | PAGE5 | Melanoma | 5068 |
| EAFQQELAL | HLA-B46:01 | PAGE5 | Melanoma | 5069 |
| GTREEVRDM | HLA-B46:01 | PAGE5 | Melanoma | 5070 |
| DVREGTLPTF | HLA-B46:01 | PAGE5 | Melanoma | 5071 |
| VQGTDVEAF | HLA-B46:01 | PAGE5 | Melanoma | 5072 |
| EVRDMSEH | HLA-B46:01 | PAGE5 | Melanoma | 5073 |
| SSQPVGPVI | HLA-C01:02 | PAGE5 | Melanoma | 5074 |
| VLEAGEGQL | HLA-C01:02 | PAGE5 | Melanoma | 5075 |
| AFQQELALL | HLA-C01:02 | PAGE5 | Melanoma | 5076 |
| TLPTFDPTKVL | HLA-C01:02 | PAGE5 | Melanoma | 5077 |
| TLPTFDPTKV | HLA-C01:02 | PAGE5 | Melanoma | 5078 |
| DAPGDGPDV | HLA-C01:02 | PAGE5 | Melanoma | 5079 |
| SSQPVGPVI | HLA-C03:04 | PAGE5 | Melanoma | 5080 |
| EAFQQELAL | HLA-C03:04 | PAGE5 | Melanoma | 5081 |
| VEAFQQELAL | HLA-C03:04 | PAGE5 | Melanoma | 5082 |
| PTFDPTKVL | HLA-C03:04 | PAGE5 | Melanoma | 5083 |
| FQQELALLK | HLA-C04:01 | PAGE5 | Melanoma | 5084 |
| AFQQELALL | HLA-C04:01 | PAGE5 | Melanoma | 5085 |
| VREGTLPTF | HLA-C04:01 | PAGE5 | Melanoma | 5086 |
| TFDPTKVL | HLA-C04:01 | PAGE5 | Melanoma | 5087 |
| TFDPTKVLE | HLA-C04:01 | PAGE5 | Melanoma | 5088 |
| TFDPTKVLEA | HLA-C04:01 | PAGE5 | Melanoma | 5089 |
| VREGTLPTF | HLA-C07:01 | PAGE5 | Melanoma | 5090 |
| SSQPVGPVI | HLA-C07:01 | PAGE5 | Melanoma | 5091 |
| FQQELALLKI | HLA-C07:01 | PAGE5 | Melanoma | 5092 |
| TREEVRDM | HLA-C07:01 | PAGE5 | Melanoma | 5093 |
| KRQEEEPPTD | HLA-C07:01 | PAGE5 | Melanoma | 5094 |
| GDGPDVREG | HLA-C07:01 | PAGE5 | Melanoma | 5095 |
| VREGTLPTF | HLA-C07:02 | PAGE5 | Melanoma | 5096 |
| AFQQELALL | HLA-C07:02 | PAGE5 | Melanoma | 5097 |
| SSQPVGPVI | HLA-C07:02 | PAGE5 | Melanoma | 5098 |
| TREEVRDM | HLA-C07:02 | PAGE5 | Melanoma | 5099 |
| FQQELALL | HLA-C07:02 | PAGE5 | Melanoma | 5100 |
| FLMKKELDY | HLA-A01:01 | PGK2 | Testis | 5101 |
| MIIGGGMAY | HLA-A01:01 | PGK2 | Testis | 5102 |
| VADKIQLIK | HLA-A01:01 | PGK2 | Testis | 5103 |
| ASIPSIKY | HLA-A01:01 | PGK2 | Testis | 5104 |
| NMEIGASLF | HLA-A01:01 | PGK2 | Testis | 5105 |
| ALMDEIVKA | HLA-A02:01 | PGK2 | Testis | 5106 |
| FLMKKELDYFA | HLA-A02:01 | PGK2 | Testis | 5107 |
| YSLAPVAVEL | HLA-A02:01 | PGK2 | Testis | 5108 |
| SLAPVAVEL | HLA-A02:01 | PGK2 | Testis | 5109 |
| IVWNGPLGV | HLA-A02:01 | PGK2 | Testis | 5110 |
| FLKDCVGAEV | HLA-A02:01 | PGK2 | Testis | 5111 |
| VIMRVDFNV | HLA-A02:01 | PGK2 | Testis | 5112 |
| GFLMKKELDYFA | HLA-A02:01 | PGK2 | Testis | 5113 |
| GMAYTFLKV | HLA-A02:01 | PGK2 | Testis | 5114 |
| KILPGVEAL | HLA-A02:01 | PGK2 | Testis | 5115 |
| CLDNGAKAV | HLA-A02:01 | PGK2 | Testis | 5116 |
| KLDVRGKRV | HLA-A02:01 | PGK2 | Testis | 5117 |
| LLEGKILPGV | HLA-A02:01 | PGK2 | Testis | 5118 |
| ELLEGKILPGV | HLA-A02:01 | PGK2 | Testis | 5119 |
| RVDFNVPMKK | HLA-A03:01 | PGK2 | Testis | 5120 |
| IMRVDFNVPMKK | HLA-A03:01 | PGK2 | Testis | 5121 |
| RIKASIPSIK | HLA-A03:01 | PGK2 | Testis | 5122 |
| KVADKIQLIK | HLA-A03:01 | PGK2 | Testis | 5123 |
| GVFEWDAPAK | HLA-A03:01 | PGK2 | Testis | 5124 |
| SLAPVAVELK | HLA-A03:01 | PGK2 | Testis | 5125 |
| GVFEWDAFAK | HLA-A11:01 | PGK2 | Testis | 5126 |
| GQMAYTFLK | HLA-A11:01 | PGK2 | Testis | 5127 |
| KASGFLMKK | HLA-A11:01 | PGK2 | Testis | 5128 |
| KVADKIQLIK | HLA-A11:01 | PGK2 | Testis | 5129 |
| VWNGPLGVF | HLA-A24:02 | PGK2 | Testis | 5130 |
| KYSLAPVAV | HLA-A24:02 | PGK2 | Testis | 5131 |
| IGGGMAYTF | HLA-A24:02 | PGK2 | Testis | 5132 |
| VWNGPLGVFEW | HLA-A24:02 | PGK2 | Testis | 5133 |
| VRITFPVDF | HLA-A24:02 | PGK2 | Testis | 5134 |
| RIKASIPSI | HLA-A30:01 | PGK2 | Testis | 5135 |
| RIKASIPSIK | HLA-A30:01 | PGK2 | Testis | 5136 |
| KASGELMKK | HLA-A30:01 | PGK2 | Testis | 5137 |
| SNKNHAQVV | HLA-A30:01 | PGK2 | Testis | 5138 |
| KGQDPSGKK | HLA-A30:01 | PGK2 | Testis | 5139 |
| IVKDIMAK | HLA-A30:01 | PGK2 | Testis | 5140 |
| HAQVVAQAR | HLA-A33:03 | PGK2 | Testis | 5141 |
| FAKALENPVR | HLA-A33:03 | PGK2 | Testis | 5142 |
| DVRGKRVIMR | HLA-A33:03 | PGK2 | Testis | 5143 |
| LTLDKLDVR | HLA-A33:03 | PGK2 | Testis | 5144 |
| LPHKASGFL | HLA-B07:02 | PGK2 | Testis | 5145 |
| NPVRPFLAI | HLA-B07:02 | PGK2 | Testis | 5146 |
| NPVRPFLAIL | HLA-B07:02 | PGK2 | Testis | 5147 |
| NPAPGSVIL | HLA-B07:02 | PGK2 | Testis | 5148 |
| NPAPGSVILL | HLA-B07:02 | PGK2 | Testis | 5149 |
| APVAVELKSL | HLA-B07:02 | PGK2 | Testis | 5150 |
| MSLSKKLTL | HLA-B08:01 | PGK2 | Testis | 5151 |
| FLMKKELDYF | HLA-B08:01 | PGK2 | Testis | 5152 |
| SLSKKLTL | HLA-B08:01 | PGK2 | Testis | 5153 |
| SGFLMIKKEL | HLA-B08:01 | PGK2 | Testis | 5154 |
| LENPVRPFLAI | HLA-B13:02 | PGK2 | Testis | 5155 |
| LEGKILPGV | HLA-B13:02 | PGK2 | Testis | 5156 |
| LDYFAKALENPV | HLA-B13:02 | PGK2 | Testis | 5157 |
| GQDPSGKKI | HLA-B13:02 | PGK2 | Testis | 5158 |
| ALMDEIVKA | HLA-B13:02 | PGK2 | Testis | 5159 |
| GMAYTFLKV | HLA-B13:02 | PGK2 | Testis | 5160 |
| MIIGGGMAY | HLA-B46:-1 | PGK2 | Testis | 5161 |
| MAYTFLKVL | HLA-B46:01 | PGK2 | Testis | 5162 |
| FAKGTKALM | HLA-B46:01 | PGK2 | Testis | 5163 |
| AEPDKIEAF | HLA-B46:01 | PGK2 | Testis | 5164 |
| SLAPVAVEL | HLA-B46:01 | PGK2 | Testis | 5165 |
| SLAPVAVEL | HLA-C01:02 | PGK2 | Testis | 5166 |
| MAYTFLKVL | HLA-C01:02 | PGK2 | Testis | 5167 |
| YSLAPVAVEL | HLA-C01:02 | PGK2 | Testis | 5168 |
| ILPGVEAL | HLA-C01:02 | PGK2 | Testis | 5169 |
| LAPVAVEL | HLA-C01:02 | PGK2 | Testis | 5170 |
| ISPGWMGL | HLA-C01:02 | PGK2 | Testis | 5171 |
| MAYTFLKVL | HLA-C03:04 | PGK2 | Testis | 5172 |
| YSLAPVAVEL | HLA-C03:04 | PGK2 | Testis | 5173 |
| MSLSKKLTL | HLA-C03:04 | PGK2 | Testis | 5174 |
| FAKGTKALM | HLA-C03:04 | PGK2 | Testis | 5175 |
| FAKGTKAL | HLA-C03:04 | PGK2 | Testis | 5176 |
| VWNGPLGVF | HLA-C04:01 | PGK2 | Testis | 5177 |
| LENPVRPFL | HLA-C04:01 | PGK2 | Testis | 5178 |
| NMEIGASLF | HLA-C04:01 | PGK2 | Testis | 5179 |
| KFDENAQV | HLA-C04:01 | PGK2 | Testis | 5180 |
| LAPVAVEL | HLA-C04:01 | PGK2 | Testis | 5181 |
| VRITFPVDF | HLA-C07:01 | PGK2 | Testis | 5182 |
| MAYTFLKVL | HLA-C07:01 | PGK2 | Testis | 5183 |
| VRITFPVDFV | HLA-C07:01 | PGK2 | Testis | 5184 |
| SLAPVAVEL | HLA-C07:01 | PGK2 | Testis | 5185 |
| KRVIMRVD | HLA-C07:01 | PGK2 | Testis | 5186 |
| LENPVRPF | HLA-C07:01 | PGK2 | Testis | 5187 |
| VRITFPVDF | HLA-C07:02 | PGK2 | Testis | 5188 |
| MAYTFLKVL | HLA-C07:02 | PGK2 | Testis | 5189 |
| MSLSKKLTL | HLA-C07:02 | PGK2 | Testis | 5190 |
| VRPFLAIL | HLA-C07:02 | PGK2 | Testis | 5191 |
| SLAPVAVEL | HLA-C07:02 | PGK2 | Testis | 5192 |
| VTDMCKTEY | HLA-A01:01 | PNLIPRP1 | Pancreas | 5193 |
| WVTDMCKTEY | HLA-A01:01 | PNLIPRP1 | Pancreas | 5194 |
| MLDILLTEY | HLA-A01:01 | PNLIPRP1 | Pancreas | 5195 |
| MLDILLVKY | HLA-A01:01 | PNLIPRP1 | Pancreas | 5196 |
| MLIFWTITL | HLA-A02:01 | PNLIPRP1 | Pancreas | 5197 |
| AQMLDILLV | HLA-A02:01 | PNLIPRP1 | Pancreas | 5198 |
| GIWAGQVLPV | HLA-A02:01 | PNLIPRP1 | Pancreas | 5199 |
| FLWNNNVINPTL | HLA-A02:01 | PNLIPRP1 | Pancreas | 5200 |
| LLTEYSYPPSKV | HLA-A02:01 | PNLIPRP1 | Pancreas | 5201 |
| KLFEVEEV | HLA-A02:01 | PNLIPRP1 | Pancreas | 5202 |
| QMLDILLV | HLA-A02:01 | PNLIPRP1 | Pancreas | 5203 |
| LIFWTITLFL | HLA-A02:01 | PNLIPRP1 | Pancreas | 5204 |
| MLIFWTITLFL | HLA-A02:01 | PNLIPRP1 | Pancreas | 5205 |
| VINPTLPKV | HLA-A02:01 | PNLIPRP1 | Pancreas | 5206 |
| KLDVGTIEKV | HLA-A02:01 | PNLIPRP1 | Pancreas | 5207 |
| KLFEVEEVNC | HLA-A02:01 | PNLIPRP1 | Pancreas | 5208 |
| LLLSDPSTI | HLA-A02:01 | PNLIPRP1 | Pancreas | 5209 |
| ILNPDGFAA | HLA-A02:01 | PNLIPRP1 | Pancreas | 5210 |
| RLDPSDADFV | HLA-A02:01 | PNLIPRP1 | Pancreas | 5211 |
| GLDPVEASF | HLA-A02:01 | PNLIPRP1 | Pancreas | 5212 |
| AAYPCTSYK | HLA-A03:01 | PNLIPRP1 | Pancreas | 5213 |
| KTEYSYPPSK | HLA-A03:01 | PNLIPRP1 | Pancreas | 5214 |
| LVKYSYPPSK | HLA-A03:01 | PNLIPRP1 | Pancreas | 5215 |
| FAAYPCTSYK | HLA-A03:01 | PNLIPRP1 | Pancreas | 5216 |
| NVINPTLPK | HLA-A03:01 | PNLIPRP1 | Pancreas | 5217 |
| KIGTRFLLY | HLA-A03:01 | PNLIPRP1 | Pancreas | 5218 |
| AAYPCTSYK | HLA-A11:01 | PNLIPRP1 | Pancreas | 5219 |
| NVINPTLPK | HLA-A11:01 | PNLIPRP1 | Pancreas | 5220 |
| STHSYEFDAK | HLA-A11:01 | PNLIPRP1 | Pancreas | 5221 |
| KILPWSPEK | HLA-ALL:01 | PNLIPRP1 | Pancreas | 5222 |
| AYPCTSYKSF | HLA-A24:02 | PNLIPRP1 | Pancreas | 5223 |
| SYKYYLESI | HLA-A24:02 | PNLIPRP1 | Pancreas | 5224 |
| SYPPSKVHLI | HLA-A24:02 | PNLIPRP1 | Pancreas | 5225 |
| SYPPSKVHL | HLA-A24:02 | PNLIPRP1 | Pancreas | 5226 |
| YYLESILNPDGF | HLA-A24:02 | PNLIPRP1 | Pancreas | 5227 |
| AAYPCTSYK | HLA-A30:01 | PNLIPRP1 | Pancreas | 5228 |
| RSRMPTDGS | HLA-A30:01 | PNLIPRP1 | Pancreas | 5229 |
| KTEYSYPPSK | HLA-A30:01 | PNLIPRP1 | Pancreas | 5230 |
| KVKFLWNNN | HLA-A30:01 | PNLIPRP1 | Pancreas | 5231 |
| KILPWSPEK | HLA-A30:01 | PNLIPRP1 | Pancreas | 5232 |
| SYKSFESDK | HLA-A30:01 | PNLIPRP1 | Pancreas | 5233 |
| NTHQYSIFR | HLA-A33:03 | PNLIPRP1 | Pancreas | 5234 |
| HYADKFAGR | HLA-A33:03 | PNLIPRP1 | Pancreas | 5235 |
| DFVACNHLR | HLA-A33:03 | PNLIPRP1 | Pancreas | 5236 |
| EASNFARWR | HLA-A33:03 | PNLIPRP1 | Pancreas | 5237 |
| EPWGGTAIR | HLA-A33:03 | PNLIPRP1 | Pancreas | 5238 |
| MPGCKKNAL | HLA-B07:02 | PNLIPRP1 | Pancreas | 5239 |
| TPGLSRITGL | HLA-B07:02 | PNLIPRP1 | Pancreas | 5240 |
| SPEKIGTRFL | HLA-B07:02 | PNLIPRP1 | Pancreas | 5241 |
| APLIPFLQF | HLA-B07:02 | PNLIPRP1 | Pancreas | 5242 |
| NPNNFQILL | HLA-B07:02 | PNLIPRP1 | Pancreas | 5243 |
| MPGCKKNAL | HLA-B08:01 | PNLIPRP1 | Pancreas | 5244 |
| HLRSYKYYL | HLA-B08:01 | PNLIPRP1 | Pancreas | 5245 |
| FARWRYGVSI | HLA-B08:01 | PNLIPRP1 | Pancreas | 5246 |
| TGQIKVAL | HLA-B08:01 | PNLIPRP1 | Pancreas | 5247 |
| YPPSKVHL | HLA-B08:01 | PNLIPRP1 | Pancreas | 5248 |
| SDADFVDVI | HLA-B13:02 | PNLIPRP1 | Pancreas | 5249 |
| AQMLDILLV | HLA-B13:02 | PNLIPRP1 | Pancreas | 5250 |
| YNFCSEDTV | HLA-B13:02 | PNLIPRP1 | Pancreas | 5251 |
| HQYSIFRGI | HLA-B13:02 | PNLIPRP1 | Pancreas | 5252 |
| TQAANNVRV | HLA-B13:02 | PNLIPRP1 | Pancreas | 5253 |
| FAAYPCTSY | HLA-B46:01 | PNLIPRP1 | Pancreas | 5254 |
| FVACNHLRSY | HLA-B46:01 | PNLIPRP1 | Pancreas | 5255 |
| YSYPPSKVH | HLA-B46:01 | PNLIPRP1 | Pancreas | 5256 |
| ILKPGSTHSY | HLA-B46:01 | PNLIPRP1 | Pancreas | 5257 |
| VACNHLRSY | HLA-B46:01 | PNLIPRP1 | Pancreas | 5258 |
| AAYPCTSY | HLA-B46:01 | PNLIPRP1 | Pancreas | 5259 |
| YSYPPSKVHL | HLA-C01:02 | PNLIPRP1 | Pancreas | 5260 |
| VLPVSRSRM | HLA-C01:02 | PNLIPRP1 | Pancreas | 5261 |
| FFPNGGESM | HLA-C01:02 | PNLIPRP1 | Pancreas | 5262 |
| SMPGCKKNAL | HLA-C01:02 | PNLIPRP1 | Pancreas | 5263 |
| YSYPPSKVHL | HLA-C03:04 | PNLIPRP1 | Pancreas | 5264 |
| HSYEFDAKI | HLA-C03:04 | PNLIPRP1 | Pancreas | 5265 |
| FAAYPCTSY | HLA-C03:04 | PNLIPRP1 | Pancreas | 5266 |
| YSYPPSKVH | HLA-C03:04 | PNLIPRP1 | Pancreas | 5267 |
| TAIRPLKIL | HLA-C03:04 | PNLIPRP1 | Pancreas | 5268 |
| FFPNGGESM | HLA-C04:01 | PNLIPRP1 | Pancreas | 5269 |
| RLDPSDADF | HLA-C04:01 | PNLIPRP1 | Pancreas | 5270 |
| GLDPVEASF | HLA-C04:01 | PNLIPRP1 | Pancreas | 5271 |
| SYPPSKVHL | HLA-C04:01 | PNLIPRP1 | Pancreas | 5272 |
| IFWTITLFL | HLA-C04:01 | PNLIPRP1 | Pancreas | 5273 |
| SFESTPEEV | HLA-C04:01 | PNLIPRP1 | Pancreas | 5274 |
| WRYGVSITL | HLA-C07:01 | PNLIPRP1 | Pancreas | 5275 |
| VREDTLLTL | HLA-C07:01 | PNLIPRP1 | Pancreas | 5276 |
| ARWRYGVSI | HLA-C07:01 | PNLIPRP1 | Pancreas | 5277 |
| SRMPTDGSL | HLA-C07:01 | PNLIPRP1 | Pancreas | 5278 |
| RSYKYYLES | HLA-C07:01 | PNLIPRP1 | Pancreas | 5279 |
| WRYGVSITL | HLA-C07:02 | PNLIPRP1 | Pancreas | 5280 |
| FFPNGGESM | HLA-C07:02 | PNLIPRP1 | Pancreas | 5281 |
| VREDTLLTL | HLA-C07:02 | PNLIPRP1 | Pancreas | 5282 |
| SYPPSKVHL | HLA-C07:02 | PNLIPRP1 | Pancreas | 5283 |
| SRMPTDGSL | HLA-C07:02 | PNLIPRP1 | Pancreas | 5284 |
| GTDPNIPDEY | HLA-A01:01 | POTEG; POTEE; | Colorectal; Prostate; | 5285 |
| | | POTEH | nc | |
| LMAKALLLY | HLA-A01:01 | POTEG; POTEE; | Colorectal; Prostate; | 5286 |
| | | POTEH | Uterine | |
| SDVDIRKDLY | HLA-A01:01 | POTEE | Colorectal; Uterine | 5287 |
| LSDYKEKQMPKY | HLA-A01:01 | POTEE | Colorectal; Uterine | 5288 |
| MKSDVDIRKDLY | HLA-A01:01 | POTEE | Colorectal; Uterine | 5289 |
| KSDVDIRKDLY | HLA-A01:01 | POTEE | Colorectal; Uterine | 5290 |
| FPDTENEEY | HLA-A01:01 | POTEE | Colorectal; Uterine | 5291 |
| FPDNESEEY | HLA-A01:01 | POTEE | Colorectal; Uterine | 5292 |
| GLTPLLLGV | HLA-A02:01 | POTEG; POTEE; | Colorectal; Prostate; | 5293 |
| | | POTEH | Uterine | |
| LLLEQNIDV | HLA-A02:01 | POTEG; POTEE; | Colorectal; Prostate; | 5294 |
| | | POTEH | Uterine | |
| GLLENLINGV | HLA-A02:01 | POTEE | Colorectal; Uterine | 5295 |
| KLMAKALLL | HLA-A02:01 | POTEG; POTEE; | Colorectal; Prostate; | 5296 |
| | | POTEH | Uterine | |
| ALAPSMMKI | HLA-A02:01 | POTEE | Colorectal; Uterine | 5297 |
| YLEDIESV | HLA-A02:01 | POTEE | Colorectal; Uterine | 5298 |
| HGLTPLLLGV | HLA-A02:01 | POTEG; POTEE; | Colorectal; Prostate; | 5299 |
| | | POTEH | Uterine | |
| TMDDDTAVL | HLA-A02:01 | POTEE | Colorectal; Uterine | 5300 |
| FLIKKKANLNAL | HLA-A02:01 | POTEG; POTEE; | Colorectal; Prostate; | 5301 |
| | | POTEH | Uterine | |
| ALFQPCFLGM | HLA-A02:01 | POTEE | Colorectal; Uterine | 5302 |
| RMQKEIAAL | HLA-A02:01 | POTEE | Colorectal; Uterine | 5303 |
| LLENLTNGV | HLA-A02:01 | POTEE | Colorectal; Uterine | 5304 |
| TMDDDTAVLV | HLA-A02:01 | POTEE | Colorectal; Uterine | 5305 |
| RELPDYLMKI | HLA-A02:01 | POTEE | Colorectal; Uterine | 5306 |
| LLLDRRCQLNV | HLA-A02:01 | POTEE | Colorectal; Uterine | 5307 |
| KYLEDIESV | HLA-A02:01 | POTEE | Colorectal; Uterine | 5308 |
| TLREELAML | HLA-A02:01 | POTEE | Colorectal; Uterine | 5309 |
| FLIKKKANL | HLA-A02:01 | POTEG; POTEE; | Colorectal; Prostate; | 5310 |
| | | POTEH | Ine | |
| ILIHEEKQIEV | HLA-A02:01 | POTEG; POTEE; | Colorectal; Prostate; | 5311 |
| | | POTEH | Uterine | |
| GLLENLTNG | HLA-A02:01 | POTEE | Colorectal; Uterine | 5312 |
| LLLDRRCQL | HLA-A02:01 | POTEG; POTEE; | Colorectal; Prostate; | 5313 |
| | | POTEH | Uterine | |
| KLMAKALLLY | HLA-A03:01 | POTEG; POTEE; | Colorectal; Prostate; | 5314 |
| | | POTEH | Uterine | |
| TMYPGMAHRMQK | HLA-A03:01 | POTEE | Colorectal; Uterine | 5315 |
| ATYNEDKLMAK | HLA-A03:01 | POTEG; POTEE; | Colorectal; Prostate; | 5316 |
| | | POTEH | Uterine | |
| GMMGGMHQK | HLA-A03:01 | POTEE | Colorectal; Uterine | 5317 |
| KTLRSKMGK | HLA-A03:01 | POTEG; POTEE; | Colorectal; Prostate; | 5318 |
| | | POTEH | Uterine | |
| RIIAPPKRK | HLA-A03:01 | POTEE | Colorectal; Uterine | 5319 |
| ILLTEAPLNPK | HLA-A03:01 | POTEE | Colorectal; Uterine | 5320 |
| ALFQPCFLGM | HLA-A03:01 | POTEE | Colorectal:Uterine | 5321 |
| AALAPSMMK | HLA-ALL:01 | POTEE | Colorectal; Uterine | 5322 |
| SAMKTLRNK | HLA-A11:01 | POTEE | Colorectal; Uterine | 5323 |
| SAMKTLRSK | HLA-A11:01 | POTEG; POTEE; | Colorectal; Prostate; | 5324 |
| | | POTEH | nc | |
| QVVKFLIKK | HLA-A11:01 | POTEG; POTEE; | Colorectal; Prostate; | 5325 |
| | | POTEH | Uterine | |
| GMMGGMHQK | HLA-A11:01 | POTEE | Colorectal; Uterine | 5326 |
| RSQEPEINK | HLA-A11:01 | POTEE | Colorectal; Uterine | 5327 |
| ATYNEDKLMAK | HLA-A11:01 | POTEG; POTEE; | Colorectal; Prostate; | 5328 |
| | | POTEH | Uterine | |
| RYGRTALIL | HLA-A24:02 | POTEG; POTEE; | Colorectal; Prostate; | 5329 |
| | | POTEH | Uterine | |
| MYPGMAHRM | HLA-A24:02 | POTEE | Colorectal; Uterine | 5330 |
| KYLEDIESV | HLA-A24:02 | POTEE | Colorectal; Uterine | 5331 |
| KYPMEHGII | HLA-A24:02 | POTEE | Colorectal; Uterine | 5332 |
| EYHRICELL | HLA-A24:02 | POTEE | Colorectal; Uterine | 5333 |
| ILTERGYRF | HLA-A24:02 | POTEE | Colorectal; Uterine | 5334 |
| KIRIIAPPK | HLA-A30:01 | POTEE | Colorectal; Uterine | 5335 |
| KTLRSKMGK | HLA-A30:01 | POTEG; POTEE; | Colorectal; Prostate; | 5336 |
| | | POTEH | Uterine | |
| KTLRNKMGK | HLA-A30:01 | POTEE | Colorectal; Uterine | 5337 |
| RTALHLASA | HLA-A30:01 | POTEG; POTEE; | Colorectal; Prostate; | 5338 |
| | | POTEH | Uterine | |
| RYGRTALILA | HLA-A30:01 | POTEG; POTEE; | Colorectal; Prostate; | 5339 |
| | | POTEH | Uterine | |
| RSQEPEINK | HLA-A30:01 | POTEE | Colorectal; Uterine | 5340 |
| VVKFLIKKK | HLA-A30:01 | POTEG; POTEE; | Colorectal; Prostate; | 5341 |
| | | POTEH | Uterine | |
| HQKESYVGK | HLA-A30:01 | POTEE | Colorectal; Uterine | 5342 |
| MLRDTDVNK | HLA-A30:01 | POTEE | Colorectal; Uterine | 5343 |
| SVKKPFGLR | HLA-A33:03 | POTEG; POTEE; | Colorectal; Prostate; | 5344 |
| | | POTEH | Uterine | |
| TMYPGMAHR | HLA-A33:03 | POTEE | Colorectal; Uterine | 5345 |
| TTMYPGMAHR | HLA-A33:03 | POTEE | Colorectal; Uterine | 5346 |
| AAWWGKVPR | HLA-A33:03 | POTEG; POTEE; | Colorectal; Prostate; | 5347 |
| | | POTEH | Uterine | |
| NALPHATLR | HLA-A33:03 | POTEE | Colorectal; Uterine | 5348 |
| NSNPENVSR | HLA-A33:03 | POTEE | Colorectal; Uterine | 5349 |
| EVVKLLLDR | HLA-A33:03 | POTEG; POTEE; | Colorectal; Prostate; | 5350 |
| | | POTEH | Uterine | |
| ENSNPENVSR | HLA-A33:03 | POTEE | Colorectal; Uterine | 5351 |
| KPFGLRSKM | HLA-B07:02 | POTEG; POTEE; | Colorectal; Prostate; | 5352 |
| | | POTEH | Uterine | |
| VPRKDLIVM | HLA-B07:02 | POTEG; POTEE; | Colorectal; Prostate; | 5353 |
| | | POTEH | Uterine | |
| RPRQQGMM | HLA-B07:02 | POTEE | Colorectal; Uterine | 5354 |
| VPIYEGNAL | HLA-B07:02 | POTEE | Colorectal; Uterine | 5355 |
| RPRQQGMMGGM | HLA-B07:02 | POTEE | Colorectal; Uterine | 5356 |
| IPDEYGNTTL | HLA-B07:02 | POTEE | Colorectal; Uterine | 5357 |
| APEEHPILL | HLA-B07:02 | POTEE | Colorectal; Uterine | 5358 |
| VPRKDLIVML | HLA-B07:02 | POTEG; POTEE; | Colorectal; Prostate; | 5359 |
| | | POTEH | Uterine | |
| FLIKKKANL | HLA-B08:01 | POTEG; POTEE; | Colorectal; Prostate; | 5360 |
| | | POTEH | Uterine | |
| LLLDRRCQL | HLA-B08:01 | POTEG; POTEE; | Colorectal; Prostate; | 5361 |
| | | POTEH | Uterine | |
| MMKIRITAP | HLA-B08:01 | POTEE | Colorectal; Uterine | 5362 |
| VLDNKKRTAL | HLA-B08:01 | POTEE | Colorectal; Uterine | 5363 |
| FLIKKKANLNAL | HLA-B08:01 | POTEG; POTEE; | Colorectal; Prostate; | 5364 |
| | POTEH | Uterine | | |
| MMKIRILA | HLA-B08:01 | POTEE | Colorectal; Uterine | 5365 |
| APPKRKYSV | HLA-B08:01 | POTEE | Colorectal; Uterine | 5366 |
| DYKEKQML | HLA-B08:01 | POTEG; POTEE | Colorectal; Prostate; | 5367 |
| | | | Uterine | |
| ESKNKHGL | HLA-B08:01 | POTEG; POTEE; | Colorectal; Prostate; | 5368 |
| | | POTEH | Uterine | |
| EEYHRICEL | HLA-B08:01 | POTEE | Colorectal; Uterine | 5369 |
| RELENFMAI | HLA-B13:02 | POTEE | Colorectal; Uterine | 5370 |
| RELPDYLMKI | HLA-B13:02 | POTEE | Colorectal; Uterine | 5371 |
| KQQVVKFLI | HLA-B13:02 | POTEG; POTEE; | Colorectal; Prostate; | 5372 |
| | | POTEH | Uterine | |
| REYAVSSHHHVI | HLA-B13:02 | POTEE | Colorectal; Uterine | 5373 |
| DRELENFMAI | HLA-B13:02 | POTEE | Colorectal; Uterine | 5374 |
| ALAPSMMKI | HLA-B13:02 | POTEE | Colorectal; Uterine | 5375 |
| ELPDYLMKI | HLA-B13:02 | POTEE | Colorectal; Uterine | 5376 |
| GLTPLLLGV | HLA-B13:02 | POTEG; POTEE; | Colorectal; Prostate; | 5377 |
| | | POTEH | Uterine | |
| KQIEVVEKM | HLA-B13:02 | POTEE | Colorectal; Uterine | 5378 |
| YSVWVGGSI | HLA-B46:01 | POTEE | Colorectal; Uterine | 5379 |
| LMAKALLLY | HLA-B46:01 | POTEG; POTEE; | Colorectal; Prostate; | 5380 |
| | | POTEH | Uterine | |
| IAALAPSMM | HLA-B46:01 | POTEE | Colorectal; Uterine | 5381 |
| YAIYNEDKL | HLA-B46:01 | POTEG; POTEE; | Colorectal; Prostate; | 5382 |
| | | POTEH | Uterine | |
| VAIQAVPSL | HLA-B46:01 | POTEE | Colorectal; Uterine | 5383 |
| IIAPPKRKY | HLA-B46:01 | POTEE | Colorectal; Uterine | 5384 |
| TAREYAVSS | HLA-B46:01 | POTEG; POTEE; | Colorectal; Prostate; | 5385 |
| | | POTEH | Uterine | |
| INKDGDREL | HLA-B46:01 | POTEE | Colorectal; Uterine | 5386 |
| TMYPGMAH | HLA-B46:01 | POTEE | Colorectal; Uterine | 5387 |
| SQRFKGSEN | HLA-B46:01 | POTEE | Colorectal; Uterine | 5388 |
| TMDDDTAVL | HLA-C01:02 | POTEE | Colorectal; Uterine | 5389 |
| ALPHATLRL | HLA-C01:02 | POTEE | Colorectal; Uterine | 5390 |
| RMQKEIAAL | HLA-C01:02 | POTEE | Colorectal; Uterine | 5391 |
| VAIQAVPSL | HLA-C01:02 | POTEE | Colorectal; Uterine | 5392 |
| KLMAKALLL | HLA-C01:02 | POTEG; POTEE; | Colorectal; Prostate; | 5393 |
| | | POTEH | | |
| TVPIYEGNAL | HLA-C01:02 | POTEE | Colorectal; Uterine | 5394 |
| VAPEEHPIL | HLA-C01:02 | POTEE | Colorectal; Uterine | 5395 |
| NIPDEYGNTIL | HLA-C01:02 | POTEE | Colorectal; Uterine | 5396 |
| SQPEKMSQEL | HLA-C01:02 | POTEE | Colorectal; Uterine | 5397 |
| VAIQAVPSL | HLA-C03:04 | POTEE | Colorectal; Uterine | 5398 |
| IAALAPSMM | HLA-C03:04 | POTEE | Colorectal; Uterine | 5399 |
| YAVSSHHHV | HLA-C03:04 | POTEE | Colorectal; Uterine | 5400 |
| YSVWVGGSI | HLA-C03:04 | POTEE | Colorectal; Uterine | 5401 |
| YAIYNEDKL | HLA-C03:04 | POTEG; POTEE; | Colorectal; Prostate; | 5402 |
| | | POTEH | Uterine | |
| IAMLRLEL | HLA-C03:04 | POTEE | Colorectal; Uterine | 5403 |
| NALPHATL | HLA-C03:04 | POTEE | Colorectal; Uterine | 5404 |
| TMDDDTAVL | HLA-C04:01 | POTEE | Colorectal; Uterine | 5405 |
| MYPGMAHRM | HLA-C04:01 | POTEE | Colorectal; Uterine | 5406 |
| RLDLAGREL | HLA-C04:01 | POTEE | Colorectal; Uterine | 5407 |
| LFQPCFLGM | HLA-C04:01 | POTEE | Colorectal; Uterine | 5408 |
| WGDYDDSAF | HLA-C04:01 | POTEG; POTEE; | Colorectal; Prostate; | 5409 |
| | | POTEH | Uterine | |
| DYDDSAFM | HLA-C04:01 | POTEG; POTEE; | Colorectal; Prostate; | 5410 |
| | | POTEH | Uterine | |
| MDDDTAVLV | HLA-C04:01 | POTEE | Colorectal; Uterine | 5411 |
| DRYGRTALI | HLA-C07:01 | POTEG; POTEE; | Colorectal; Prostate; | 5412 |
| | | POTEH | Uterine | |
| LDRYGRTALI | HLA-C07:01 | POTEG; POTEE; | Colorectal; Prostate; | 5413 |
| | | POTEH | Uterine | |
| HRAAWWGKV | HLA-C07:01 | POTEG; POTEE; | Colorectal; Prostate; | 5414 |
| | | POTEH | Uterine | |
| HRMQKEIAAL | HLA-C07:01 | POTEE | Colorectal; Uterine | 5415 |
| MYPGMAHRM | HLA-C07:01 | POTEE | Colorectal; Uterine | 5416 |
| DRYGRTALIL | HLA-C07:01 | POTEG; POTEE; | Colorectal; Prostate; | 5417 |
| | | POTEH | Uterine | |
| PRKDLIVML | HLA-C07:01 | POTEG; POTEE; | Uterine | 5418 |
| | | POTEH | Colorectal; Prostate; | |
| RRCQLNVL | HLA-C07:01 | POTEE | Colorectal; Uterine | 5419 |
| SRTPESQQF | HLA-C07:01 | POTEG; POTEE; | Colorectal; Prostate; | 5420 |
| | | POTEH | Uterine | |
| RCFPCYRES | HLA-C07:01 | POTEE | Colorectal; Uterine | 5421 |
| LSGQTAREY | HLA-C07:01 | POTEG; POTEE; | Uterine | 5422 |
| | | POTEH | Colorectal; Prostate; | |
| MYPGMAHRM | HLA-C07:02 | POTEE | Colorectal; Uterine | 5423 |
| DRYGRTALI | HLA-C07:02 | POTEG; POTEE; | Colorectal; Prostate; | 5424 |
| | | POTEH | Uterine | |
| HRMQKEIAAL | HLA-C07:02 | POTEE | Colorectal; Uterine | 5425 |
| RYGRTALIL | HLA-C07:02 | POTEG; POTEE; | Colorectal; Prostate; | 5426 |
| | | POTEH | Uterine | |
| HHHVICQLL | HLA-C07:02 | POTEE | Colorectal; Uterine | 5427 |
| PRKDLIVML | HLA-C07:02 | POTEG; POTEE; | Colorectal; Prostate; | 5428 |
| | | POTEH | Uterine | |
| SRTPESQQF | HLA-C07:02 | POTEG; POTEE; | Colorectal; Prostate; | 5429 |
| | | POTEH | Uterine | |
| VAPEEHPIL | HLA-C07:02 | POTEE | Colorectal; Uterine | 5430 |
| VRGEDLDKL | HLA-C07:02 | POTEE | Colorectal; Uterine | 5431 |
| NTALHYAIY | HLA-A01:01 | POTEG; POTEH | Prostate | 5432 |
| YGNTALHYAIY | HLA-A01:01 | POTEG; POTEH | Prostate | 5433 |
| GNTALHYATY | HLA-A01:01 | POTEG; POTEH | Prostate | 5434 |
| EYGNTALHYAIY | HLA-A01:01 | POTEG; POTEH | Prostate | 5435 |
| FPDTENEQY | HLA-A01:01 | POTEG; POTEH | Prostate | 5436 |
| YGNTALHYAIYN | HLA-A01:01 | POTEG; POTEH | Prostate | 5437 |
| IPDEYGNTALHY | HLA-A01:01 | POTEG; POTEH | Prostate | 5438 |
| LSDYKEKQMILKV | HLA-A01:01 | POTEG | Prostate | 5439 |
| NVICQLLSDY | HLA-A01:01 | POTEG; POTEH | Prostate | 5440 |
| LSEEQNTGIL | HLA-A01:01 | POTEG; POTEH | Prostate | 5441 |
| LSEEQNTGI | HLA-A01:01 | POTEG; POTEH | Prostate | 5442 |
| VLQPQPQLF | HLA-A01:01 | POTEG; POTEH | Prostate | 5443 |
| LSEEQNTG | HLA-A01:01 | POTEG; POTEH | Prostate | 5444 |
| LSEEQNTGILQ | HLA-A01:01 | POTEG; POTEH | Prostate | 5445 |
| TADNGDDGL | HLA-A01:01 | POTEG; POTEH | Prostate | 5446 |
| QLFFSFFLFI | HLA-A02:01 | POTEG; POTEH | Prostate | 5447 |
| QPQLFFSFFL | HLA-A02:01 | POTEG; POTEH | Prostate | 5448 |
| QLFPSFFL | HLA-A02:01 | POTEG; POTEH | Prostate | 5449 |
| FLFIFIFIFI | HLA-A02:01 | POTEG; POTEH | Prostate | 5450 |
| LLLDRRCQLNI | HLA-A02:01 | POTEG; POTEH | Prostate | 5451 |
| PQLFFSFFL | HLA-A02:01 | POTEG; POTEH | Prostate | 5452 |
| QLFFSFFLFIFI | HLA-A02:01 | POTEG; POTEH | Prostate | 5453 |
| FSFFLFIFI | HLA-A02:01 | POTEG; POTEH | Prostate | 5454 |
| QLFFSFFLF | HLA-A02:01 | POTEG; POTEH | Prostate | 5455 |
| FLFIFIFI | HLA-A02:01 | POTEG; POTEH | Prostate | 5456 |
| SLQPRPPEA | HLA-A02:01 | POTEG; POTEH | Prostate | 5457 |
| LLDRRCQLNI | HLA-A02:01 | POTEG; POTEH | Prostate | 5458 |
| KLLLDRRCQLNI | HLA-A02:01 | POTEG; POTEH | Prostate | 5459 |
| MVAEAGSMPA | HLA-A02:01 | POTEG; POTEH | Prostate | 5460 |
| GSMPAASSV | HLA-A02:01 | POTEG; POTEH | Prostate | 5461 |
| PQLFFSFFLFI | HLA-A02:01 | POTEG; POTEH | Prostate | 5462 |
| LLLDRRCQLNIL | HLA-A02:01 | POTEG; POTEH | Prostate | 5463 |
| GILQDEILI | HLA-A02:01 | POTEG; POTEH | Prostate | 5464 |
| QPQPQLFFSFFL | HLA-A02:01 | POTEG; POTEH | Prostate | 5465 |
| YAVSSHHNV | HLA-A02:01 | POTEG | Prostate | 5466 |
| ILQDEILI | HLA-A02:01 | POTEG; POTEH | Prostate | 5467 |
| QPQLFFSFFLFI | HLA-A02:01 | POTEG; POTEH | Prostate | 5468 |
| FLFIFIFIF | HLA-A02:01 | POTEG; POTEH | Prostate | 5469 |
| FFLFIFIFIFI | HLA-A02:01 | POTEG; POTEH | Prostate | 5470 |
| FFSFFLFIFI | HLA-A02:01 | POTEG; POTEH | Prostate | 5471 |
| LFFSFFLFI | HLA-A02:01 | POTEG; POTEH | Prostate | 5472 |
| SFFLFIFIFIFI | HLA-A02:01 | POTEG; POTEH | Prostate | 5473 |
| VLQPQPQL | HLA-A02:01 | POTEG; POTEH | Prostate | 5474 |
| ILQDEILIH | HLA-A02:01 | POTEG; POTEH | Prostate | 5475 |
| ILDNKKRTA | HLA-A02:01 | POTEG; POTEH | Prostate | 5476 |
| ILDNKKRTAL | HLA-A02:01 | POTEG; POTEH | Prostate | 5477 |
| VLQPQPQLF | HLA-A02:01 | POTEG; POTEH | Prostate | 5478 |
| ILQDEILIHE | HLA-A02:01 | POTEG; POTEH | Prostate | 5479 |
| QLSEEQNTGI | HLA-A02:01 | POTEG; POTEH | Prostate | 5480 |
| MVLQPQPQL | HLA-A02:01 | POTEG; POTEH | Prostate | 5481 |
| THMGFPENL | HLA-A02:01 | POTEG; POTEH | Prostate | 5482 |
| ILQDEILIHEE | HLA-A02:01 | POTEG; POTEH | Prostate | 5483 |
| SLQPRPPEAQ | HLA-A02:01 | POTEG; POTEH | Prostate | 5484 |
| VLQPQPQLFF | HLA-A02:01 | POTEG; POTEH | Prostate | 5485 |
| QLSEEQNTG | HLA-A02:01 | POTEG; POTEH | Prostate | 5486 |
| GHPNFPTTL | HLA-A02:01 | POTEG | Prostate | 5487 |
| IPDEYGNTAL | HLA-A02:01 | POTEG; POTEH | Prostate | 5488 |
| ALHYAIYNE | HLA-A02:01 | POTEG; POTEH | Prostate | 5489 |
| FFLFIFIFI | HLA-A02:01 | POTEG; POTEH | Prostate | 5490 |
| IPDEYGNTA | HLA-A02:01 | POTEG; POTEH | Prostate | 5491 |
| VMLKDTDMNK | HLA-A03:01 | POTEG; POTEH | Prostate | 5492 |
| GSMPAASSVK | HLA-A03:01 | POTEG; POTEH | Prostate | 5493 |
| MLKDTDMNK | HLA-A03:01 | POTEG; POTEH | Prostate | 5494 |
| MLKDTDMNKK | HLA-A03:01 | POTEG; POTEH | Prostate | 5495 |
| KVPRKDLIVMLK | HLA-A03:01 | POTEG; POTEH | Prostate | 5496 |
| LDNKKRTALTK | HLA-A03:01 | POTEG; POTEH | Prostate | 5497 |
| ALHYAIYNEDK | HLA-A03:01 | POTEG; POTEH | Prostate | 5498 |
| GSMPAASSVKK | HLA-A03:01 | POTEG; POTEH | Prostate | 5499 |
| IVMLKDTDMNK | HLA-A03:01 | POTEG; POTEH | Prostate | 5500 |
| ILQDEILIH | HLA-A03:01 | POTEG; POTEH | Prostate | 5501 |
| HCFPWCRGSGK | HLA-A03:01 | POTEG; POTEH | Prostate | 5502 |
| GILQDEILIH | HLA-A03:01 | POTEG; POTEH | Prostate | 5503 |
| QLFFSFFLF | HLA-A03:01 | POTEG; POTEH | Prostate | 5504 |
| FLFIFIFIFI | HLA-A03:01 | POTEG; POTEH | Prostate | 5505 |
| VLQPQPQLFF | HLA-A03:01 | POTEG; POTEH | Prostate | 5506 |
| FIPIFIFIFF | HLA-A03:01 | POTEG; POTEH | Prostate | 5507 |
| FLFIFIFIF | HLA-A03:01 | POTEG; POTEH | Prostate | 5508 |
| SVSQAGVQW | HLA-A03:01 | POTEG; POTEH | Prostate | 5509 |
| GSMPAASSVK | HLA-A11:01 | POTEG; POTEH | Prostate | 5510 |
| MSQEPEINK | HLA-A11:01 | POTEG; POTEH | Prostate | 5511 |
| GSMPAASSVKK | HLA-A11:01 | POTEG; POTEH | Prostate | 5512 |
| VMLKDTDMNK | HLA-A11:01 | POTEG; POTEH | Prostate | 5513 |
| KVPRKDLIVMLK | HLA-A11:01 | POTEG; POTEH | Prostate | 5514 |
| TALHYAIYNEDK | HLA-A11:01 | POTEG; POTEH | Prostate | 5515 |
| CQLNILDNK | HLA-A11:01 | POTEG; POTEH | Prostate | 5516 |
| MLKDTDMNK | HLA-A11:01 | POTEG; POTEH | Prostate | 5517 |
| IVMLKDTDMNK | HLA-AII:01 | POTEG; POTEH | Prostate | 5518 |
| SVSQAGVQW | HLA-A11:01 | POTEG; POTEH | Prostate | 5519 |
| RKVEEEMKK | HLA-A11:01 | POTEG; POTEH | Prostate | 5520 |
| RKDLIVMLK | HLA-A11:01 | POTEG; POTEH | Prostate | 5521 |
| GILQDEILIH | HLA-A11:01 | POTEG; POTEH | Prostate | 5522 |
| FSFFLFIFI | HLA-A11:01 | POTEG; POTEH | Prostate | 5523 |
| PQPQLFFSF | HLA-A24:02 | POTEG; POTEH | Prostate | 5524 |
| KWCRHCFPW | HLA-A24:02 | POTEG | Prostate | 5525 |
| QLFFSFFLF | HLA-A24:02 | POTEG; POTEH | Prostate | 5526 |
| LFFSFFLF | HLA-A24:02 | POTEG; POTEH | Prostate | 5527 |
| PQLFFSFFLF | HLA-A24:02 | POTEG; POTEH | Prostate | 5528 |
| QPQPQLFFSF | HLA-A24:02 | POTEG; POTEH | Prostate | 5529 |
| VLQPQPQLF | HLA-A24:02 | POTEG; POTEH | Prostate | 5530 |
| VLQPQPQLFFSF | HLA-A24:02 | POTEG; POTEH | Prostate | 5531 |
| SFFLFIFIF | HLA-A24:02 | POTEG; POTEH | Prostate | 5532 |
| PQPQLFFSFF | HLA-A24:02 | POTEG; POTEH | Prostate | 5533 |
| IFIFIFIFF | HLA-A24:02 | POTEG; POTEH | Prostate | 5534 |
| FFSFFLFIF | HLA-A24:02 | POTEG; POTEH | Prostate | 5535 |
| LFIFIFIFI | HLA-A24:02 | POTEG; POTEH | Prostate | 5536 |
| VLQPQPQLFF | HLA-A24:02 | POTEG; POTEH | Prostate | 5537 |
| GSMPAASSVK | HLA-A30:01 | POTEG; POTEH | Prostate | 5538 |
| HVRREDLDK | HLA-A30:01 | POTEG; POTEH | Prostate | 5539 |
| MLKDTDMNK | HLA-A30:01 | POTEG; POTEH | Prostate | 5540 |
| GSMPAASSV | HLA-A30:01 | POTEG; POTEH | Prostate | 5541 |
| SSKSNVGTS | HLA-A30:01 | POTEG | Prostate | 5542 |
| STHMGFPEN | HLA-A30:01 | POTEG; POTEH | Prostate | 5543 |
| STHMGFPENL | HLA-A30:01 | POTEG; POTEH | Prostate | 5544 |
| KNKIESHSV | HLA-A30:01 | POTEG; POTEH | Prostate | 5545 |
| RYHVRREDLDK | HLA-A30:01 | POTEG; POTEH | Prostate | 5546 |
| RSKMGKWCR | HLA-A30:01 | POTEG; POTEH | Prostate | 5547 |
| MSQEPEINK | HLA-A30:01 | POTEG; POTEH | Prostate | 5548 |
| MVLQPQPQL | HLA-A30:01 | POTEG; POTEH | Prostate | 5549 |
| CQLNILDNK | HLA-A30:01 | POTEG; POTEH | Prostate | 5550 |
| KSKVGPWGD | HLA-A30:01 | POTEG | Prostate | 5551 |
| RDFSGHPNF | HLA-A30:01 | POTEG | Prostate | 5552 |
| RKVEEEMKK | HLA-A30:01 | POTEG; POTEH | Prostate | 5553 |
| FMEPRYHVRR | HLA-A33:03 | POTEG; POTEH | Prostate | 5554 |
| RSKMGKWCR | HLA-A33:03 | POTEG; POTEH | Prostate | 5555 |
| AFMEPRYHVRR | HLA-A33:03 | POTEG; POTEH | Prostate | 5556 |
| SAFMEPRYHVRR | HLA-A33:03 | POTEG; POTEH | Prostate | 5557 |
| TLRSKMGKWCR | HLA-A33:03 | POTEG | Prostate | 5558 |
| CFPWCRGSSK | HLA-A33:03 | POTEG | Prostate | 5559 |
| WCRHCFPWCR | HLA-A33:03 | POTEG | Prostate | 5560 |
| LRSKMGKWCR | HLA-A33:03 | POTEG; POTEH | Prostate | 5561 |
| CFPWCRGSGK | HLA-A33:03 | POTEG; POTEH | Prostate | 5562 |
| DTENEQYHR | HLA-A33:03 | POTEG | Prostate | 5563 |
| NILDNKKR | HLA-A33:03 | POTEG; POTEH | Prostate | 5564 |
| TALTKAVQCR | HLA-A33:03 | POTEG | Prostate | 5565 |
| MNKKDKQKR | HLA-A33:03 | POTEG; POTEH | Prostate | 5566 |
| TALTKAVQC | HLA-A33:03 | POTEG; POTEH | Prostate | 5567 |
| EPRYHVRR | HLA-A33:03 | POTEG; POTEH | Prostate | 5568 |
| MSQEPEINK | HLA-A33:03 | POTEG; POTEH | Prostate | 5569 |
| EINKGGDR | HLA-A33:03 | POTEG; POTEH | Prostate | 5570 |
| DMNKKDKQKR | HLA-A33:03 | POTEG; POTEH | Prostate | 5571 |
| HPNFPTTLPI | HLA-B07:02 | POTEG | Prostate | 5572 |
| QPRPPEAQM | HLA-B07:02 | POTEG; POTEH | Prostate | 5573 |
| LQPRPPEAQM | HLA-B07:02 | POTEG; POTEH | Prostate | 5574 |
| RPPEAQMVL | HLA-B07:02 | POTEG; POTEH | Prostate | 5575 |
| IPDEYGNTAL | HLA-B07:02 | POTEG; POTEH | Prostate | 5576 |
| QPRPPEAQMVL | HLA-B07:02 | POTEG; POTEH | Prostate | 5577 |
| HPNFPTTL | HLA-B07:02 | POTEG | Prostate | 5578 |
| SLQPRPPEAQM | HLA-B07:02 | POTEG; POTEH | Prostate | 5579 |
| SSLQPRPPEAQM | HLA-B07:02 | POTEG; POTEH | Prostate | 5580 |
| FPWCRGSSKSNV | HLA-B07:02 | POTEG | Prostate | 5581 |
| QPRPPEAQMV | HLA-B07:02 | POTEG; POTEH | Prostate | 5582 |
| QPQLFFSFF | HLA-B07:02 | POTEG; POTEH | Prostate | 5583 |
| QPQPQLFESP | HLA-B07:02 | POTEG; POTEH | Prostate | 5584 |
| QPQPQLFF | HLA-B07:02 | POTEG; POTEH | Prostate | 5585 |
| ILDNKKRTAL | HLA-B08:01 | POTEG; POTEH | Prostate | 5586 |
| MNKKDKQKRTAL | HLA-B08:01 | POTEG; POTEH | Prostate | 5587 |
| EMKKHGSTHM | HLA-B08:01 | POTEG; POTEH | Prostate | 5588 |
| NILDNKKRTAL | HLA-B08:01 | POTEG; POTEH | Prostate | 5589 |
| LLLDRRCQLNIL | HLA-B08:01 | POTEG; POTEH | Prostate | 5590 |
| LNILDNKKRTAL | HLA-B08:01 | POTEG; POTEH | Prostate | 5591 |
| FPWCRGSSKSNV | HLA-B08:01 | POTEG | Prostate | 5592 |
| MGKWCRHCF | HLA-B08:01 | POTEG; POTEH | Prostate | 5593 |
| DRRCQLNIL | HLA-B08:01 | POTEG; POTEH | Prostate | 5594 |
| HPNFPTTL | HLA-B08:01 | POTEG | Prostate | 5595 |
| ESKNKIESH | HLA-B08:01 | POTEG; POTEH | Prostate | 5596 |
| FIFIFIFF | HLA-B08:01 | POTEG; POTEH | Prostate | 5597 |
| EEKQIEVA | HLA-B08:01 | POTEG; POTEH | Prostate | 5598 |
| TALTKAVQ | HLA-B08:01 | POTEG; POTEH | Prostate | 5599 |
| DEYGNTAL | HLA-B08:01 | POTEG; POTEH | Prostate | 5600 |
| FLFIFIFIF | HLA-B08:01 | POTEG; POTEH | Prostate | 5601 |
| QPQLFFSF | HLA-B08:01 | POTEG; POTEH | Prostate | 5602 |
| HHNVICQL | HLA-B08:01 | POTEG | Prostate | 5603 |
| HPNFPTTLPI | HLA-B13:02 | POTEG | Prostate | 5604 |
| REYAVSSHHNVI | HLA-B13:02 | POTEG | Prostate | 5605 |
| REDECALMLL | HLA-B13:02 | POTEG | Prostate | 5606 |
| FSFFLFIFI | HLA-B13:02 | POTEG; POTEH | Prostate | 5607 |
| QPQLFFSFFL | HLA-B13:02 | POTEG; POTEH | Prostate | 5608 |
| LDRRCQLNI | HLA-B13:02 | POTEG; POTEH | Prostate | 5609 |
| QLFFSFFLFI | HLA-B13:02 | POTEG; POTEH | Prostate | 5610 |
| QLFFSFFLF | HLA-B13:02 | POTEG; POTEH | Prostate | 5611 |
| REYAVSSHHNV | HLA-B13:02 | POTEG | Prostate | 5612 |
| REDECALML | HLA-B13:02 | POTEG | Prostate | 5613 |
| SQEPEINKG | HLA-B13:02 | POTEG; POTEH | Prostate | 5614 |
| KQLSEEQNT | HLA-B13:02 | POTEG; POTEH | Prostate | 5615 |
| SQAGVQWCD | HLA-B13:02 | POTEG; POTEH | Prostate | 5616 |
| KQIEVAENE | HLA-B13:02 | POTEG; POTEH | Prostate | 5617 |
| GILQDEILI | HLA-B13:02 | POTEG; POTEH | Prostate | 5618 |
| ADIESKNKI | HLA-B13:02 | POTEG; POTEH | Prostate | 5619 |
| AVSSHHNVI | HLA-B13:02 | POTEG | Prostate | 5620 |
| EQNDTQKQL | HLA-B13:02 | POTEG; POTEH | Prostate | 5621 |
| RPPEAQMV | HLA-B13:02 | POTEG; POTEH | Prostate | 5622 |
| YAVSSHHNV | HLA-B46:01 | POTEG | Prostate | 5623 |
| GSMPAASSV | HLA-B46:01 | POTEG; POTEH | Prostate | 5624 |
| NTALHYAIY | HLA-B46:01 | POTEG; POTEH | Prostate | 5625 |
| YAVSSHHNVI | HLA-B46:01 | POTEG | Prostate | 5626 |
| MVAEAGSMPA | HLA-B46:01 | POTEG; POTEH | Prostate | 5627 |
| VLQPQPQLF | HLA-B46:01 | POTEG; POTEH | Prostate | 5628 |
| MVLQPQPQLP | HLA-B46:01 | POTEG; POTEH | Prostate | 5629 |
| FSFFLFIFI | HLA-B46:01 | POTEG; POTEH | Prostate | 5630 |
| LQPQPQLFF | HLA-B46:01 | POTEG; POTEH | Prostate | 5631 |
| ESKNKIESH | HLA-B46:01 | POTEG; POTEH | Prostate | 5632 |
| KSKVGPWGDY | HLA-B46:01 | POTEG | Prostate | 5633 |
| FIFIFIFIF | HLA-B46:01 | POTEG; POTEH | Prostate | 5634 |
| FLFIFIFIF | HLA-B46:01 | POTEG; POTEH | Prostate | 5635 |
| KSKVGPWGD | HLA-B46:01 | POTEG | Prostate | 5636 |
| SLQPRPPEA | HLA-B46:01 | POTEG; POTEH | Prostate | 5637 |
| MLKVSSEN | HLA-B46:01 | POTEG | Prostate | 5638 |
| YHRDFSGH | HLA-B46:01 | POTEG | Prostate | 5639 |
| RPPEAQMVL | HLA-C01:02 | POTEG; POTEH | Prostate | 5640 |
| GSMPAASSV | HLA-C01:02 | POTEG; POTEH | Prostate | 5641 |
| VLQPQPQLF | HLA-C01:02 | POTEG; POTEH | Prostate | 5642 |
| FSGHPNFPTTL | HLA-C01:02 | POTEG | Prostate | 5643 |
| YAVSSHHNV | HLA-C01:02 | POTEG | Prostate | 5644 |
| MVLQPQPQL | HLA-C01:02 | POTEG; POTEH | Prostate | 5645 |
| AVSSHHNVI | HLA-C01:02 | POTEG | Prostate | 5646 |
| LQPQPQLFF | HLA-C01:02 | POTEG; POTEH | Prostate | 5647 |
| SGHPNFPTTL | HLA-C01:02 | POTEG | Prostate | 5648 |
| NLPNGATAD | HLA-C01:02 | POTEG | Prostate | 5649 |
| NIPDEYGNTAL | HLA-C01:02 | POTEG; POTEH | Prostate | 5650 |
| GHPNFPTTL | HLA-C01:02 | POTEG | Prostate | 5651 |
| NLPNGATA | HLA-C01:02 | POTEG | Prostate | 5652 |
| NFPTTLPI | HLA-C01:02 | POTEG | Prostate | 5653 |
| NLPNGATADN | HLA-C01:02 | POTEG | Prostate | 5654 |
| RPPEAQMV | HLA-C01:02 | POTEG; POTEH | Prostate | 5655 |
| YAVSSHHNV | HLA-C03:04 | POTEG | Prostate | 5656 |
| GSMPAASSV | HLA-C03:04 | POTEG; POTEH | Prostate | 5657 |
| YAVSSHHNVI | HLA-C03:04 | POTEG | Prostate | 5658 |
| MVLQPQPQL | HLA-C03:04 | POTEG; POTEH | Prostate | 5659 |
| AVSSHHNVI | HLA-C03:04 | POTEG | Prostate | 5660 |
| IVMLKDTDM | HLA-C03:04 | POTEG; POTEH | Prostate | 5661 |
| AGSMPAASSV | HLA-C03:04 | POTEG; POTEH | Prostate | 5662 |
| FSFFLFIFI | HLA-C03:04 | POTEG; POTEH | Prostate | 5663 |
| RPPEAQMVL | HLA-C03:04 | POTEG; POTEH | Prostate | 5664 |
| FSGHPNFPTTL | HLA-C03:04 | POTEG | Prostate | 5665 |
| FIFIFIFF | HLA-C03:04 | POTEG; POTEH | Prostate | 5666 |
| FIFIFIFIF | HLA-C03:04 | POTEG; POTEH | Prostate | 5667 |
| FIFIFIFI | HLA-C03:04 | POTEG; POTEH | Prostate | 5668 |
| VLQPQPQLF | HLA-C04:01 | POTEG; POTEH | Prostate | 5669 |
| HHNVICQLL | HLA-C04:01 | POTEG | Prostate | 5670 |
| LQPQPQLFF | HLA-C04:01 | POTEG; POTEH | Prostate | 5671 |
| REDECALML | HLA-C04:01 | POTEG | Prostate | 5672 |
| RPPEAQMVL | HLA-C04:01 | POTEG; POTEH | Prostate | 5673 |
| HRDFSGHPNF | HLA-C04:01 | POTEG | Prostate | 5674 |
| CREDECALM | HLA-C04:01 | POTEG | Prostate | 5675 |
| VLQPQPQLFF | HLA-C04:01 | POTEG; POTEH | Prostate | 5676 |
| REDECALMLL | HLA-C04:01 | POTEG | Prostate | 5677 |
| IFIFIFIFF | HLA-C04:01 | POTEG; POTEH | Prostate | 5678 |
| FFSFFLFIF | HLA-C04:01 | POTEG; POTEH | Prostate | 5679 |
| SFFLFIFIF | HLA-C04:01 | POTEG; POTEH | Prostate | 5680 |
| SFFLFIFI | HLA-C04:01 | POTEG; POTEH | Prostate | 5681 |
| FFSFFLFI | HLA-C04:01 | POTEG; POTEH | Prostate | 5682 |
| IFIFIFIF | HLA-C04:01 | POTEG; POTEH | Prostate | 5683 |
| LFFSFFLF | HLA-C04:01 | POTEG; POTEH | Prostate | 5684 |
| FFLFIFIF | HLA-C04:01 | POTEG; POTEH | Prostate | 5685 |
| CREDECALM | HLA-C07:01 | POTEG | Prostate | 5686 |
| HHNVICQLL | HLA-C07:01 | POTEG | Prostate | 5687 |
| SHHNVICQL | HLA-C07:01 | POTEG | Prostate | 5688 |
| KRTALTKAV | HLA-C07:01 | POTEG; POTEH | Prostate | 5689 |
| HRDFSGHPNF | HLA-C07:01 | POTEG | Prostate | 5690 |
| THMGFPENL | HLA-C07:01 | POTEG; POTEH | Prostate | 5691 |
| DRRCQLNIL | HLA-C07:01 | POTEG; POTEH | Prostate | 5692 |
| VRREDLDKL | HLA-C07:01 | POTEG; POTEH | Prostate | 5693 |
| SHHNVICQLL | HLA-C07:01 | POTEG | Prostate | 5694 |
| PRPPEAQMVL | HLA-C07:01 | POTEG; POTEH | Prostate | 5695 |
| RPPEAQMVL | HLA-C07:01 | POTEG; POTEH | Prostate | 5696 |
| PRYHVRRED | HLA-C07:01 | POTEG; POTEH | Prostate | 5697 |
| HPNFPTTL | HLA-C07:01 | POTEG | Prostate | 5698 |
| LPNGATAD | HLA-C07:01 | POTEG | Prostate | 5699 |
| RRCQLNIL | HLA-C07:01 | POTEG; POTEH | Prostate | 5700 |
| RYHVRRED | HLA-C07:01 | POTEG; POTEH | Prostate | 5701 |
| TENEQYHSD | HLA-C07:01 | POTEG; POTEH | Prostate | 5702 |
| REDECALML | HLA-C07:01 | POTEG | Prostate | 5703 |
| SHHNVICQL | HLA-C07:02 | POTEG | Prostate | 5704 |
| HHNVICQLL | HLA-C07:02 | POTEG | Prostate | 5705 |
| GHPNFPTTL | HLA-C07:02 | POTEG | Prostate | 5706 |
| THMGFPENL | HLA-C07:02 | POTEG; POTEH | Prostate | 5707 |
| RYHVRREDL | HLA-C07:02 | POTEG; POTEH | Prostate | 5708 |
| CREDECALM | HLA-C07:02 | POTEG | Prostate | 5709 |
| VLQPQPQLF | HLA-C07:02 | POTEG; POTEH | Prostate | 5710 |
| KRTALTKAV | HLA-C07:02 | POTEG; POTEH | Prostate | 5711 |
| HRDFSGHPNF | HLA-C07:02 | POTEG | Prostate | 5712 |
| PRPPEAQMVL | HLA-C07:02 | POTEG; POTEH | Prostate | 5713 |
| VRREDLDKL | HLA-C07:02 | POTEG; POTEH | Prostate | 5714 |
| PRPPEAQM | HLA-C07:02 | POTEG; POTEH | Prostate | 5715 |
| EYGNTALHY | HLA-C07:02 | POTEG; POTEH | Prostate | 5716 |
| RPPEAQMVL | HLA-C07:02 | POTEG; POTEH | Prostate | 5717 |
| FIFIFIFIF | HLA-C07:02 | POTEG; POTEH | Prostate | 5718 |
| RREDLDKL | HLA-C07:02 | POTEG; POTEH | Prostate | 5719 |
| FLFIFIFIF | HLA-C07:02 | POTEG; POTEH | Prostate | 5720 |
| LSDYKEKQILKV | HLA-A01:01 | POTEH | Prostate | 5721 |
| LSDYKEKQI | HLA-A01:01 | POTEH | Prostate | 5722 |
| LSDYKEKQILK | HLA-A01:01 | POTEH | Prostate | 5723 |
| LSDYKEKQIL | HLA-A01:01 | POTEH | Prostate | 5724 |
| RHNVICQLLSDY | HLA-A01:01 | POTEH | Prostate | 5725 |
| LLSDYKEKQILK | HLA-A01:01 | POTEH | Prostate | 5726 |
| LLSDYKEKQI | HLA-A01:01 | POTEH | Prostate | 5727 |
| VSSRHNVICQLL | HLA-A01:01 | POTEH | Prostate | 5728 |
| MGKWCRHCFA | HLA-A01:01 | POTEH | Prostate | 5729 |
| FAWCRGSGK | HLA-A01:01 | POTEH | Prostate | 5730 |
| YKEKQILKV | HLA-A01:01 | POTEH | Prostate | 5731 |
| YKEKQILK | HLA-A01:01 | POTEH | Prostate | 5732 |
| LTNGATADN | HLA-A01:01 | POTEH | Prostate | 5733 |
| LINGATAD | HLA-A01:01 | POTEH | Prostate | 5734 |
| VSSRHNVIC | HLA-A01:01 | POTEH | Prostate | 5735 |
| LLSDYKEKQI | HLA-A02:01 | POTEH | Prostate | 5736 |
| KMGKWCRHCFA | HLA-A02:01 | POTEH | Prostate | 5737 |
| FAWCRGSGKSNV | HLA-A02:01 | POTEH | Prostate | 5738 |
| YAVSSRHNV | HLA-A02:01 | POTEH | Prostate | 5739 |
| SKMGKWCRHCFA | HLA-A02:01 | POTEH | Prostate | 5740 |
| MGKWCRHCFA | HLA-A02:01 | POTEH | Prostate | 5741 |
| LLSDYKEKQIL | HLA-A02:01 | POTEH | Prostate | 5742 |
| KMGKWCRHCFAW | HLA-A02:01 | POTEH | Prostate | 5743 |
| HMGFPENLT | HLA-A02:01 | POTEH | Prostate | 5744 |
| QLLSDYKEKQIL | HLA-A02:01 | POTEH | Prostate | 5745 |
| QLLSDYKEKQI | HLA-A02:01 | POTEH | Prostate | 5746 |
| CQLLSDYKEKQI | HLA-A02:01 | POTEH | Prostate | 5747 |
| FAWCRGSGK | HLA-A02:01 | POTEH | Prostate | 5748 |
| KMGKWCCHCFPW | HLA-A02:01 | POTEH | Prostate | 5749 |
| AVSSRHNVICQL | HLA-A02:01 | POTEH | Prostate | 5750 |
| GKWCRHCFA | HLA-A02:01 | POTEH | Prostate | 5751 |
| AVSSRHNVI | HLA-A02:01 | POTEH | Prostate | 5752 |
| FAWCRGSGKS | HLA-A02:01 | POTEH | Prostate | 5753 |
| HMGFPENLTNGA | HLA-A02:01 | POTEH | Prostate | 5754 |
| THMGFPENLT | HLA-A02:01 | POTEH | Prostate | 5755 |
| YAVSSRHNVI | HLA-A02:01 | POTEH | Prostate | 5756 |
| LLSDYKEKQILK | HLA-A02:01 | POTEH | Prostate | 5757 |
| KWCCHCFPWC | HLA-A02:01 | POTEH | Prostate | 5758 |
| GKWCCHCFPW | HLA-A02:01 | POTEH | Prostate | 5759 |
| HMGFPENLTN | HLA-A02:01 | POTEH | Prostate | 5760 |
| KQILKVSSE | HLA-A02:01 | POTEH | Prostate | 5761 |
| KWCCHCFPW | HLA-A02:01 | POTEH | Prostate | 5762 |
| YKEKQILKV | HLA-A02:01 | POTEH | Prostate | 5763 |
| SRHNVICQL | HLA-A02:01 | POTEH | Prostate | 5764 |
| ALTKAVQCQ | HLA-A02:01 | POTEH | Prostate | 5765 |
| NLTNGATAD | HLA-A02:01 | POTEH | Prostate | 5766 |
| AVSSRHNV | HLA-A02:01 | POTEH | Prostate | 5767 |
| SDYKEKQILKV | HLA-A02:01 | POTEH | Prostate | 5768 |
| SDYKEKQIL | HLA-A02:01 | POTEH | Prostate | 5769 |
| CRQSGKNKV | HLA-A02:01 | POTEH | Prostate | 5770 |
| DYKEKQILKV | HLA-A02:01 | POTEH | Prostate | 5771 |
| ILKVSSENS | HLA-A02:01 | POTEH | Prostate | 5772 |
| MGFPENLTN | HLA-A02:01 | POTEH | Prostate | 5773 |
| ALTKAVQCQE | HLA-A02:01 | POTEH | Prostate | 5774 |
| RHNVICQLL | HLA-A02:01 | POTEH | Prostate | 5775 |
| NLTNGATADN | HLA-A02:01 | POTEH | Prostate | 5776 |
| QILKVSSEN | HLA-A02:01 | POTEH | Prostate | 5777 |
| SRHNVICQLL | HLA-A02:01 | POTEH | Prostate | 5778 |
| KEKQILKV | HLA-A02:01 | POTEH | Prostate | 5779 |
| LSDYKEKQI | HLA-A02:01 | POTEH | Prostate | 5780 |
| FAWCRGSGK | HLA-A03:01 | POTEH | Prostate | 5781 |
| CFAWCRGSGK | HLA-A03:01 | POTEH | Prostate | 5782 |
| LLSDYKEKQILK | HLA-A03:01 | POTEH | Prostate | 5783 |
| RHCFAWCRGSGK | HLA-A03:01 | POTEH | Prostate | 5784 |
| HCPAWCRGSGK | HLA-A03:01 | POTEH | Prostate | 5785 |
| FAWCRGSGKS | HLA-A03:01 | POTEH | Prostate | 5786 |
| LSDYKERQILK | HLA-A03:01 | POTEH | Prostate | 5787 |
| SDYKEKQILK | HLA-A03:01 | POTEH | Prostate | 5788 |
| TAREYAVSSR | HLA-A03:01 | POTEH | Prostate | 5789 |
| REYAVSSRH | HLA-A03:01 | POTEH | Prostate | 5790 |
| DYKEKQILK | HLA-A03:01 | POTEH | Prostate | 5791 |
| AVSSRHNVIC | HLA-A03:01 | POTEH | Prostate | 5792 |
| REYAVSSR | HLA-A03:01 | POTEH | Prostate | 5793 |
| CCRGSGKNK | HLA-A03:01 | POTEH | Prostate | 5794 |
| FAWCRGSGK | HLA-A11:01 | POTEH | Prostate | 5795 |
| LLSDYKEKQILK | HLA-A11:01 | POTEH | Prostate | 5796 |
| CFAWCRGSGK | HLA-A11:01 | POTEH | Prostate | 5797 |
| LSDYKEKQILK | HLA-A11:01 | POTEH | Prostate | 5798 |
| SDYKEKQILK | HLA-A11:01 | POTEH | Prostate | 5799 |
| RHCFAWCRGSGK | HLA-A11:01 | POTEH | Prostate | 5800 |
| QTAREYAVSSR | HLA-A11:01 | POTEH | Prostate | 5801 |
| TAREYAVSSR | HLA-ALI:01 | POTEH | Prostate | 5802 |
| HCFAWCRGSGK | HLA-A11:01 | POTEH | Prostate | 5803 |
| DYKEKQILK | HLA-A11:01 | POTEH | Prostate | 5804 |
| AVSSRHNVI | HLA-A11:01 | POTEH | Prostate | 5805 |
| AVSSRHNVIC | HLA-A11:01 | POTEH | Prostate | 5806 |
| CCRGSGKNK | HLA-A11:01 | POTEH | Prostate | 5807 |
| AREYAVSSR | HLA-A11:01 | POTEH | Prostate | 5808 |
| MGFPENLTN | HLA-A11:01 | POTEH | Prostate | 5809 |
| KWCCHCFPW | HLA-A24:02 | POTEH | Prostate | 5810 |
| KWCRHCFAW | HLA-A24:02 | POTEH | Prostate | 5811 |
| GKWCCHCEPW | HLA-A24:02 | POTEH | Prostate | 5812 |
| KMGKWCCHCFPW | HLA-A24:02 | POTEH | Prostate | 5813 |
| MGKWCCHCFPW | HLA-A24:02 | POTEH | Prostate | 5814 |
| GKWCRHCFAW | HLA-A24:02 | POTEH | Prostate | 5815 |
| RHNVICQLL | HLA-A24:02 | POTEH | Prostate | 5816 |
| MGKWCRHCFAW | HLA-A24:02 | POTEH | Prostate | 5817 |
| KMGKWCRHCFAW | HLA-A24:02 | POTEH | Prostate | 5818 |
| DYKEKQILK | HLA-A24:02 | POTEH | Prostate | 5819 |
| DYKEKQIL | HLA-A24:02 | POTEH | Prostate | 5820 |
| EYAVSSRHN | HLA-A24:02 | POTEH | Prostate | 5821 |
| EYAVSSRHNVI | HLA-A24:02 | POTEH | Prostate | 5822 |
| EYAVSSRHNV | HLA-A24:02 | POTEH | Prostate | 5823 |
| DYKEKQILKV | HLA-A24:02 | POTEH | Prostate | 5824 |
| AVSSRHNVI | HLA-A24:02 | POTEH | Prostate | 5825 |
| MGKWCRHCFA | HLA-A30:01 | POTEH | Prostate | 5826 |
| SSRHNVICQL | HLA-A30:01 | POTEH | Prostate | 5827 |
| SSRHNVICQ | HLA-A30:01 | POTEH | Prostate | 5828 |
| SDYKEKQILK | HLA-A30:01 | POTEH | Prostate | 5829 |
| KMGKWCRHCFA | HLA-A30:01 | POTEH | Prostate | 5830 |
| AVSSRHNVI | HLA-A30:01 | POTEH | Prostate | 5831 |
| RHCFAWCRGSGK | HLA-A30:01 | POTEH | Prostate | 5832 |
| CCRGSGKNK | HLA-A30:01 | POTEH | Prostate | 5833 |
| KWCRHCFAWC | HLA-A30:01 | POTEH | Prostate | 5834 |
| DYKEKQILK | HLA-A30:01 | POTEH | Prostate | 5835 |
| DYKEKQILKV | HLA-A30:01 | POTEH | Prostate | 5836 |
| SRHNVICQL | HLA-A30:01 | POTEH | Prostate | 5837 |
| KEKQILKV | HLA-A30:01 | POTEH | Prostate | 5838 |
| KNKVGPWGD | HLA-A30:01 | POTEH | Prostate | 5839 |
| AVSSRHNV | HLA-A30:01 | POTEH | Prostate | 5840 |
| TAREYAVSSR | HLA-A33:03 | POTEH | Prostate | 5841 |
| CFAWCRGSGK | HLA-A33:03 | POTEH | Prostate | 5842 |
| WCRHCFAWCR | HLA-A33:03 | POTEH | Prostate | 5843 |
| FAWCRGSGK | HLA-A33:03 | POTEH | Prostate | 5844 |
| CCHCFPWCR | HLA-A33:03 | POTEH | Prostate | 5845 |
| DYKEKQILK | HLA-A33:03 | POTEH | Prostate | 5846 |
| WCCHCFPWCR | HLA-A33:03 | POTEH | Prostate | 5847 |
| CRHCFAWCR | HLA-A33:03 | POTEH | Prostate | 5848 |
| QTAREYAVSSR | HLA-A33:03 | POTEH | Prostate | 5849 |
| EYAVSSRHN | HLA-A33:03 | POTEH | Prostate | 5850 |
| EYAVSSRHNV | HLA-A33:03 | POTEH | Prostate | 5851 |
| DYKEKQILKV | HLA-A33:03 | POTEH | Prostate | 5852 |
| EYAVSSRH | HLA-A33:03 | POTEH | Prostate | 5853 |
| ENLTNGATAD | HLA-A33:03 | POTEH | Prostate | 5854 |
| AVSSRHNVI | HLA-B07:02 | POTEH | Prostate | 5855 |
| YAVSSRHNV | HLA-B07:02 | POTEH | Prostate | 5856 |
| YAVSSRHNVI | HLA-B07:02 | POTEH | Prostate | 5857 |
| SSRHNVICQL | HLA-B07:02 | POTEH | Prostate | 5858 |
| FPCCRGSGKNKV | HLA-B07:02 | POTEH | Prostate | 5859 |
| FAWCRGSGK | HLA-B07:02 | POTEH | Prostate | 5860 |
| FPENLTNGATAD | HLA-B07:02 | POTEH | Prostate | 5861 |
| MGFPENLINGAT | HLA-B07:02 | POTEH | Prostate | 5862 |
| REYAVSSRHNVI | HLA-B07:02 | POTEH | Prostate | 5863 |
| RHNVICQLL | HLA-B07:02 | POTEH | Prostate | 5864 |
| SDYKEKQIL | HLA-B07:02 | POTEH | Prostate | 5865 |
| SRHNVICQL | HLA-B07:02 | POTEH | Prostate | 5866 |
| AVSSRHNV | HLA-B07:02 | PQTER | Prostate | 5867 |
| RHNVICQL | HLA-B07:02 | POTEH | Prostate | 5868 |
| FPCCRGSGKN | HLA-B07:02 | POTEH | Prostate | 5869 |
| MGKWCRHCFA | HLA-B08:01 | POTEH | Prostate | 5870 |
| YAVSSRHINVI | HLA-B08:01 | POTEH | Prostate | 5871 |
| AVSSRHNVI | HLA-B08:01 | POTEH | Prostate | 5872 |
| FAWCRGSGKSNV | HLA-B08:01 | POTEH | Prostate | 5873 |
| KMGKWCRHCFA | HLA-B08:01 | POTEH | Prostate | 5874 |
| SKMGKWCRHCFA | HLA-B08:01 | POTEH | Prostate | 5875 |
| FAWCRGSG | HLA-B08:01 | POTEH | Prostate | 5876 |
| FPCCRGSGKNKV | HLA-B08:01 | POTEH | Prostate | 5877 |
| SSRHNVICQL | HLA-B08:01 | POTEH | Prostate | 5878 |
| DYKEKQIL | HLA-B08:01 | POTEH | Prostate | 5879 |
| DYKEKQILKV | HLA-B08:01 | POTEH | Prostate | 5880 |
| SDYKEKQIL | HLA-B08:01 | POTEH | Prostate | 5881 |
| SGKNKVGP | HLA-B08:01 | POTEH | Prostate | 5882 |
| DYKEKQILK | HLA-B08:01 | POTEH | Prostate | 5883 |
| KEKQILKV | HLA-B08:01 | POTEH | Prostate | 5884 |
| QILKVSSE | HLA-B08:01 | POTEH | Prostate | 5885 |
| LLSDYKEKQIL | HLA-B08:01 | POTEH | Prostate | 5886 |
| REYAVSSRHNVI | HLA-B13:02 | POTEH | Prostate | 5887 |
| REYAVSSRHNV | HLA-B13:02 | POTEH | Prostate | 5888 |
| CQLLSDYKEKQI | HLA-B13:02 | POTEH | Prostate | 5889 |
| CKWCCHCFPW | HLA-B13:02 | POTEH | Prostate | 5890 |
| AREYAVSSRHNV | HLA-B13:02 | POTEH | Prostate | 5891 |
| SDYKEKQILKV | HLA-B13:02 | POTEH | Prostate | 5892 |
| YAVSSRHNV | HLA-B13:02 | POTEH | Prostate | 5893 |
| GKWCRHCFAW | HLA-B13:02 | POTEH | Prostate | 5894 |
| YAVSSRHNVI | HLA-B13:02 | POTEH | Prostate | 5895 |
| KEKQILKV | HLA-B13:02 | POTEH | Prostate | 5896 |
| YKEKQILKV | HLA-B13:02 | POTEH | Prostate | 5897 |
| AVSSRHNVI | HLA-B13:02 | POTEH | Prostate | 5898 |
| RGSGKNKV | HLA-B13:02 | POTEH | Prostate | 5899 |
| SDYKEKQIL | HLA-B13:02 | POTEH | Prostate | 5900 |
| RHNVICQLL | HLA-B13:02 | POTEH | Prostate | 5901 |
| ALTKAVQCQ | HLA-B13:02 | POTEH | Prostate | 5902 |
| KQILKVSSE | HLA-B13:02 | POTEH | Prostate | 5903 |
| AVSSRHNV | HLA-B13:02 | POTEH | Prostate | 5904 |
| YAVSSRHNV | HLA-B46:01 | POTEH | Prostate | 5905 |
| YAVSSRHNVI | HLA-B46:01 | POTEH | Prostate | 5906 |
| FAWCRGSGK | HLA-B46:01 | POTEH | Prostate | 5907 |
| SSRHNVICQL | HLA-B46:01 | POTEH | Prostate | 5908 |
| AVSSRHNVI | HLA-B46:01 | POTEH | Prostate | 5909 |
| SGKNKVGPW | HLA-B46:01 | POTEH | Prostate | 5910 |
| FAWCRGSGKSNV | HLA-B46:01 | POTEH | Prostate | 5911 |
| SRHNVICQL | HLA-B46:01 | POTEH | Prostate | 5912 |
| FAWCRGSGKS | HLA-B46:01 | POTEH | Prostate | 5913 |
| ILKVSSEN | HLA-B46:01 | POTEH | Prostate | 5914 |
| KNKVGPWGDY | HLA-B46:01 | POTEH | Prostate | 5915 |
| NLTNGATAD | HLA-B46:01 | POTEH | Prostate | 5916 |
| YAVSSRHN | HLA-B46:01 | POTEH | Prostate | 5917 |
| KQILKVSSE | HLA-B46:01 | POTEH | Prostate | 5918 |
| ILKVSSENS | HLA-B46:01 | POTEH | Prostate | 5919 |
| YAVSSRHNV | HLA-C01:02 | POTEH | Prostate | 5920 |
| AVSSRHNVI | HLA-C01:02 | POTEH | Prostate | 5921 |
| YAVSSRHNVI | HLA-C01:02 | POTEH | Prostate | 5922 |
| RHNVICQLL | HLA-C01:02 | POTEH | Prostate | 5923 |
| LSDYKEKQI | HLA-C01:02 | POTEH | Prostate | 5924 |
| SSRHNVICQL | HLA-C01:02 | POTEH | Prostate | 5929 |
| SRHNVICQL | HLA-C01:02 | POTEH | Prostate | 5926 |
| FAWCRGSGK | HLA-C01:02 | POTEH | Prostate | 5927 |
| LSDYKEKQIL | HLA-C01:02 | POTEH | Prostate | 5928 |
| NLTNGATAD | HLA-C01:02 | POTEH | Prostate | 5929 |
| VSSRHNVI | HLA-C01:02 | POTEH | Prostate | 5930 |
| RHNVICQL | HLA-C01:02 | POTEH | Prostate | 5931 |
| ILKVSSEN | HLA-C01:02 | POTEH | Prostate | 5932 |
| YAVSSRHNV | HLA-C03:04 | POTEH | Prostate | 5933 |
| YAVSSRhNVI | HLA-C03:04 | POTEH | Prostate | 5934 |
| AVSSRHNVI | HLA-C03:04 | POTEH | Prostate | 5935 |
| FAWCRGSGKSNY | HLA-C03:04 | POTEH | Prostate | 5936 |
| FAWCRGSGK | HLA-C03:04 | POTEH | Prostate | 5937 |
| EYAVSSRHNVI | HLA-C03:04 | POTEH | Prostate | 5938 |
| EYAVSSRHNV | HLA-C03:04 | POTEH | Prostate | 5939 |
| RHNVICQLL | HLA-C03:04 | POTEH | Prostate | 5940 |
| REYAVSSRHNVI | HLA-C03:04 | POTEH | Prostate | 5941 |
| YAVSSRHN | HLA-C03:04 | POTEH | Prostate | 5942 |
| SRHNVICQL | HLA-C03:04 | POTEH | Prostate | 5943 |
| LSDYKEKQIL | HLA-C03:04 | POTEH | Prostate | 5944 |
| FAWCRGSG | HLA-C03:04 | POTEH | Prostate | 5945 |
| MGFPENLTN | HLA-C03:04 | POTEH | Prostate | 5946 |
| SDYKEKQIL | HLA-C03:04 | POTEH | Prostate | 5947 |
| RHNVICQLL | HLA-C04:01 | POTEH | Prostate | 5948 |
| FAWCRGSGK | HLA-C04:01 | POTEH | Prostate | 5949 |
| SRHNVICQL | HLA-C04:01 | POTEH | Prostate | 5950 |
| SRHNVICQLL | HLA-C04:01 | POTEH | Prostate | 5951 |
| CFAWCRGSGK | HLA-C04:01 | POTEH | Prostate | 5952 |
| YAVSSRHNV | HLA-C04:01 | POTEH | Prostate | 5953 |
| AVSSRHNVI | HLA-C04:01 | POTEH | Prostate | 5954 |
| YAVSSRHNVI | HLA-C04:01 | POTEH | Prostate | 5955 |
| MGKWCRHCFA | HLA-C04:01 | POTEH | Prostate | 5956 |
| DYKEKQIL | HLA-C04:01 | POTEH | Prostate | 5957 |
| RHNVICQL | HLA-C04:01 | POTEH | Prostate | 5958 |
| LSDYKEKQI | HLA-C04:01 | POTEH | Prostate | 5959 |
| LSDYKEKQIL | HLA-C04:01 | POTEH | Prostate | 5960 |
| YKEKQILKV | HLA-C04:01 | POTEH | Prostate | 5961 |
| LTNGATADN | HLA-C04:01 | POTEH | Prostate | 5962 |
| LTNGATAD | HLA-C04:01 | POTEH | Prostate | 5963 |
| SRHNVICQL | HLA-C07:01 | POTEH | Prostate | 5964 |
| ISRHNVICQLL | HLA-C07:01 | POTEH | Prostate | 5965 |
| SSRHNVICQL | HLA-C07:01 | POTEH | Prostate | 5966 |
| RHINVICQLL | HLA-C07:01 | POTEH | Prostate | 5967 |
| YAVSSRHNV | HLA-C07:01 | POTEH | Prostate | 5968 |
| YKEKQILKV | HLA-C07:01 | POTEH | Prostate | 5969 |
| SSRHNVICQLL | HLA-C07:01 | POTEH | Prostate | 5970 |
| CRQSGKNKV | HLA-C07:01 | POTEH | Prostate | 5971 |
| AVSSRHNVI | HLA-C07:01 | POTEH | Prostate | 5972 |
| SDYKEKQIL | HLA-C07:01 | POTEH | Prostate | 5973 |
| LTNGATAD | HLA-C07:01 | POTEH | Prostate | 5974 |
| DYKEKQIL | HLA-C07:01 | POTEH | Prostate | 5975 |
| GSGKNKVGP | HLA-C07:01 | POTEH | Prostate | 5976 |
| LSDYKEKQIL | HLA-C07:01 | POTEH | Prostate | 5977 |
| KNKVGPWGD | HLA-C07:01 | POTEH | Prostate | 5978 |
| RHNVICQL | HLA-C07:01 | POTEH | Prostate | 5979 |
| HCFAWCRGS | HLA-C07:01 | POTEH | Prostate | 5980 |
| SRHNVICQL | HLA-C07:02 | POTEH | Prostate | 5981 |
| SRHNVICQLL | HLA-C07:02 | POTEH | Prostate | 5982 |
| RHNVICQLL | HLA-C07:02 | POTEH | Prostate | 5983 |
| SSRHNVICQL | HLA-C07:02 | POTEH | Prostate | 5984 |
| YAVSSRHNV | HLA-C07:02 | POTEH | Prostate | 5985 |
| SSRHNVICQLL | HLA-C07:02 | POTEH | Prostate | 5986 |
| AVSSRHNVI | HLA-C07:02 | POTEH | Prostate | 5987 |
| YKEKQILKV | HLA-C07:02 | POTEH | Prostate | 5988 |
| CRHCFAWCR | HLA-C07:02 | POTEH | Prostate | 5989 |
| DYKEKQIL | HLA-C07:02 | POTEH | Prostate | 5990 |
| NKVGPWGDY | HLA-C07:02 | POTEH | Prostate | 5991 |
| SRHNVICQ | HLA-C07:02 | POTEH | Prostate | 5992 |
| AREYAVSSR | HLA-C07:02 | POTEH | Prostate | 5993 |
| SDYKEKQIL | HLA-C07:02 | POTEH | Prostate | 5994 |
| RHNVICQL | HLA-C07:02 | POTEH | Prostate | 5995 |
| STGEKGFRY | HLA-A01:01 | PPIAL4G | Colorectal; Uterine | 5996 |
| IVEAMEHFGY | HLA-A01:01 | PPIALAG | Colorectal; Uterine | 5997 |
| LSTGEKGFRY | HLA-A01:01 | PPIAL4G | Colorectal; Uterine | 5998 |
| SVIFFDITV | HLA-A02:01 | PPIAL4G | Colorectal; Uterine | 5999 |
| MVNSVIFFDI | HLA-A02:01 | PPIAL4G | Colorectal; Uterine | 6000 |
| NSVIFFDITV | HLA-A02:01 | PPIAL4G | Colorectal; Uterine | 6001 |
| MVNSVIFFDITV | HLA-A02:01 | PPIAL4G | Colorectal; Uterine | 6002 |
| SVIFFDITVD | HLA-A02:01 | PPIAL4G | Colorectal; Uterine | 6003 |
| WLDGKHVAF | HLA-A02:01 | PPIAL4G | Colorectal; Uterine | 6004 |
| WLDGKHVAPGKV | HLA-A02:01 | PPIAL4G | Colorectal; Uterine | 6005 |
| VIFFDITV | HLA-A02:01 | PPIAL4G | Colorectal; Uterine | 6006 |
| VNSVIFFDITV | HLA-A02:01 | PPIAL4G | Colorectal; Uterine | 6007 |
| KVKERVNIV | HLA-A02:01 | PPIAL4G | Colorectal; Uterine | 6008 |
| WLDGKHVA | HLA-A02:01 | PPIAL4G | Colorectal; Uterine | 6009 |
| FADKIPKTA | HLA-A02:01 | PPIAL4G | Colorectal; Uterine | 6010 |
| FDDENLIRK | HLA-A02:01 | PPIAL4G | Colorectal; Uterine | 6011 |
| WLDGKHVAFG | HLA-A02:01 | PPIAL4G | Colorectal; Uterine | 6012 |
| EWLDGKHVA | HLA-A02:01 | PPIAL4G | Colorectal; Uterine | 6013 |
| RISIKQFADK | HLA-A03:01 | PPIAL4G | Colorectal; Uterine | 6014 |
| AMEHFGYRNSK | HLA-A03:01 | PPIAL4G | Colorectal; Uterine | 6015 |
| ALSTGEKGFRYK | HLA-A03:01 | PPIAL4G | Colorectal; Uterine | 6016 |
| KQFADKIPK | HLA-A03:01 | PPIAL4G | Colorectal; Uterine | 6017 |
| STGEKGFRYK | HLA-A03:01 | PPIAL4G | Colorectal; Uterine | 6018 |
| STGEKGFRYK | HLA-A11:01 | PPIAL4G | Colorectal; Uterine | 6019 |
| SVIFFDITVDGK | HLA-A11:01 | PPIAL4G | Colorectal; Uterine | 6020 |
| ISIKQFADK | HLA-A11:01 | PPIAL4G | Colorectal; Uterine | 6021 |
| ITVDGKPLGR | HLA-A11:01 | PPIAL4G | Colorectal; Uterine | 6022 |
| TVDGKPLGR | HLA-A11:01 | PPIAL4G | Colorectal; Uterine | 6023 |
| RYKGSCFHRI | HLA-A24:02 | PPIAL4G | Colorectal; Uterine | 6024 |
| RYKGSCFHRII | HLA-A24:02 | PPIAL4G | Colorectal; Uterine | 6025 |
| FRYKGSCFHRI | HLA-A24:02 | PPIAL4G | Colorectal; Uterine | 6026 |
| EWLDGKHVAF | HLA-A24:02 | PPIAL4G | Colorectal; Uterine | 6027 |
| KIPKTAENF | HLA-A24:02 | PPIAL4G | Colorectal; Uterine | 6028 |
| KVKERVNIV | HLA-A30:01 | PPIAL4G | Colorectal; Uterine | 6029 |
| GYRNSKTSK | HLA-A30:01 | PPIAL4G | Colorectal; Uterine | 6030 |
| KQFADKIPK | HLA-A30:01 | PPIAL4G | Colorectal; Uterine | 6031 |
| STGEKGFRYK | HLA-A30:01 | PPIAL4G | Colorectal; Uterine | 6032 |
| EAMEHFGYR | HLA-A33:03 | PPIAL4G | Colorectal; Uterine | 6033 |
| VEAMEHFGYR | HLA-A33:03 | PPIAL4G | Colorectal; Uterine | 6034 |
| FRYKGSCFHR | HLA-A33:03 | PPIAL4G | Colorectal; Uterine | 6035 |
| VAFGKVKER | HLA-A33:03 | PPIAL4G | Colorectal; Uterine | 6036 |
| TVDGKPLGR | HLA-A33:03 | PPIAL4G | Colorectal; Uterine | 6037 |
| IPKTAENFRAL | HLA-B07:02 | PPIAL4G | Colorectal; Uterine | 6038 |
| KPLGRISI | HLA-B07:02 | PPIAL4G | Colorectal; Uterine | 6039 |
| HPNGTGDKSI | HLA-B07:02 | PPIALAG | Colorectal; Uterine | 6040 |
| KPLGRISIK | HLA-B07:02 | PPIAL4G | Colorectal; Uterine | 6041 |
| FGKVKERVNI | HLA-B08:01 | PPIAL4G | Colorectal; Uterine | 6042 |
| LIRKHTGSGI | HLA-B08:01 | PPIAL4G | Colorectal; Uterine | 6043 |
| KVKERVNIV | HLA-B08:01 | PPIAL4G | Colorectal; Uterine | 6044 |
| ENLIRKHTG | HLA-B08:01 | PPIAL4G | Colorectal; Uterine | 6045 |
| WLDGKHVAF | HLA-B08:01 | PPIAL4G | Colorectal; Uterine | 6046 |
| MVNSVIFFDI | HLA-B13:02 | PPIAL4G | Colorectal; Uterine | 6047 |
| VNSVIFFDI | HLA-B13:02 | PPIAL4G | Colorectal; Uterine | 6048 |
| SVIFFDITV | HLA-B13:02 | PPIAL4G | Colorectal; Uterine | 6049 |
| RNSKTSKKI | HLA-B13:02 | PPIAL4G | Colorectal; Uterine | 6050 |
| AFGKVKERV | HLA-B13:02 | PPIAL4G | Colorectal; Uterine | 6051 |
| ITIADCGQF | HLA-B46:01 | PPIAL4G | Colorectal; Uterine | 6052 |
| HTGSGILSM | HLA-B46:01 | PPIAL4G | Colorectal; Uterine | 6053 |
| NIVEAMEHF | HLA-B46:01 | PPIAL4G | Colorectal; Uterine | 6054 |
| VIFFDITVD | HLA-B46:01 | PPIAL4G | Colorectal; Uterine | 6055 |
| STGEKGFRY | HLA-B46:01 | PPIAL4G | Colorectal; Uterine | 6056 |
| WLDGKHVAF | HLA-B46:01 | PPIAL4G | Colorectal; Uterine | 6057 |
| WLDGKHVAF | HLA-C01:02 | PPIAL4G | Colorectal; Uterine | 6058 |
| HTGSGILSM | HLA-C01:02 | PPIAL4G | Colorectal; Uterine | 6059 |
| KIPKTAENF | HLA-C01:02 | PPIAL4G | Colorectal; Uterine | 6060 |
| KIPKTAENFRAL | HLA-C01:02 | PPIAL4G | Colorectal; Uterine | 6061 |
| KIPKTAEN | HLA-C01:02 | PPIAL40 | Colorectal; Uterine | 6062 |
| HTGSGILSM | HLA-C03:04 | PPIAL4G | Colorectal; Uterine | 6063 |
| ITIADCGQF | HLA-C03:04 | PPIAL4G | Colorectal; Uterine | 6064 |
| WLDGKHVAF | HLA-C03:04 | PPIAL4G | Colorectal; Uterine | 6065 |
| FADKIPKTA | HLA-C03:04 | PPIAL4G | Colorectal; Uterine | 6066 |
| ITVDGKPL | HLA-C03:04 | PPIAL40 | Colorectal; Uterine | 6067 |
| FDITVDGKPL | HLA-C03:04 | PPIAL4G | Colorectal; Uterine | 6068 |
| WLDGKHVAF | HLA-C04:01 | PPIAL4G | Colorectal; Uterine | 6069 |
| FFDITVDGKPL | HLA-C04:01 | PPIAL4G | Colorectal; Uterine | 6070 |
| FFDITVDGK | HLA-C04:01 | PPIAL4G | Colorectal; Uterine | 6071 |
| KFDDENLI | HLA-C04:01 | PPIAL4G | Colorectal; Uterine | 6072 |
| FFDITVDG | HLA-C04:01 | PPIAL4G | Colorectal; Uterine | 6073 |
| FRYKGSCFH | HLA-C07:01 | PPIAL4G | Colorectal; Uterine | 6074 |
| FRYKGSCFHRII | HLA-C07:01 | PPIAL4G | Colorectal; Uterine | 6075 |
| FRYKGSCFHRI | HLA-C07:01 | PPIAL4G | Colorectal; Uterine | 6076 |
| HTGSGILSM | HLA-C07:01 | PPIAL4G | Colorectal; Uterine | 6077 |
| SIYGEKFDD | HLA-C07:01 | PPIAL4G | Colorectal; Uterine | 6078 |
| IFFDITVD | HLA-C07:01 | PPIAL4G | Colorectal; Uterine | 6079 |
| FRYKGSCFH | HLA-C07:02 | PPIAL4G | Colorectal; Uterine | 6080 |
| FRYKGSCF | HLA-C07:02 | PPIAL4G | Colorectal; Uterine | 6081 |
| FRYKGSCFHRII | HLA-C07:02 | PPIAL4G | Colorectal; Uterine | 6082 |
| ERVNIVEAM | HLA-C07:02 | PPIAL4G | Colorectal; Uterine | 6083 |
| YRNSKTSK | HLA-C07:02 | PPIAL4G | Colorectal; Uterine | 6084 |
| LSNLTHVLY | HLA-A01:01 | PRAME | Lung | 6085 |
| | | | squam.; Melanoma; | |
| | | | Ovarian; Uterine | |
| CSQLTTLSFY | HLA-A01:01 | PRAME | Lung | 6086 |
| | | | squam.; Melanoma; | |
| | | | Ovarian; Uterine | |
| WSGNRASLY | HLA-A01:01 | PRAME | Lung | 6087 |
| | | | squam.; Melanoma; | |
| | | | Ovarian; Uterine | |
| ITDDQLLAL | HLA-A01:01 | PRAME | Lung | 6088 |
| | | | squam.; Melanoma; | |
| | | | Ovarian; Uterine | |
| YVDSLFFLR | HLA-A01:01 | PRAME | Lung | 6089 |
| | | | squam.; Melanoma; | |
| | | | Ovarian; Uterine | |
| NLTHVLYPV | HLA-A02:01 | PRAME | Lung | 6090 |
| | | | squam.; Melanoma; | |
| | | | Ovarian; Uterine | |
| ALYVDSLFFL | HLA-A02:01 | PRAME | Lung | 6091 |
| | | | squam.; Melanoma; | |
| | | | Ovarian; Uterine | |
| TLAKFSPYL | HLA-A02:01 | PRAME | Lung | 6092 |
| | | | squam.; Melanoma; | |
| | | | Ovarian; Uterine | |
| QLLALLPSL | HLA-A02:01 | PRAME | Lung | 6093 |
| | | | squam.; Melanoma; | |
| | | | Ovarian; Uterine | |
| WLLHHSWVWV | HLA-A02:01 | PRAME | Lung | 6094 |
| | | | squam.; Melanoma; | |
| | | | Ovarian; Uterine | |
| SLLQHLIGL | HLA-A02:01 | PRAME | Lung | 6095 |
| | | | squam.; Melanoma; | |
| | | | Ovarian; Uterine | |
| SNLTHVLYPV | HLA-A02:01 | PRAME | Lung | 6096 |
| | | | squam.; Melanoma; | |
| | | | Ovarian; Uterine | |
| YELQEALISL | HLA-A02:01 | PRAME | Lung | 6097 |
| | | | squam.; Melanoma; | |
| | | | Ovarian; Uterine | |
| VLDGLDVLL | HLA-A02:01 | PRAME | Lung | 6098 |
| | | | squam.; Melanoma; | |
| | | | Ovarian; Uterine | |
| ALISLPHGL | HLA-A02:01 | PRAME | Lung | 6099 |
| | | | squam.; Melanoma; | |
| | | | Ovarian; Uterine | |
| ALQSLLQHL | HLA-A02:01 | PRAME | Lung | 6100 |
| | | | squam.; Melanoma; | |
| | | | Ovarian; Uterine | |
| RLSEGDVMHL | HLA-A02:01 | PRAME | Lung | 6101 |
| | | | squam.; Melanoma; | |
| | | | Ovarian; Uterine | |
| ALLERASATL | HLA-A02:01 | PRAME | Lung | 6102 |
| | | | squam.; Melanoma; | |
| | | | Ovarian; Uterine | |
| ELQEALISL | HLA-A02:01 | PRAME | Lung | 6103 |
| | | | squam.; Melanoma; | |
| | | | Ovarian; Uterine | |
| RLDQLLRHV | HLA-A02:01 | PRAME | Lung | 6104 |
| | | | squam.; Melanoma; | |
| | | | Ovarian; Uterine | |
| VLYPVPLESY | HLA-A03:01 | PRAME | Lung | 6105 |
| | | | squam.; Melanoma; | |
| | | | Ovarian; Uterine | |
| KIFAMPMQDIK | HLA-A03:01 | PRAME | Lung | 6106 |
| | | | squam.; Melanoma; | |
| | | | Ovarian; Uterine | |
| VELAGQSLLK | HLA-A03:01 | PRAME | Lung | 6107 |
| | | | squam.; Melanoma; | |
| | | | Ovarian; Uterine | |
| ELFSYLIEK | HLA-A03:01 | PRAME | Lung | 6108 |
| | | | squam.; Melanoma; | |
| | | | Ovarian; Uterine | |
| VLYPVPLES | HLA-A03:01 | PRAME | Lung | 6109 |
| | | | squam.; Melanoma; | |
| | | | Ovarian; Uterine | |
| ASSYISPEK | HLA-A11:01 | PRAME | Lung | 6110 |
| | | | squam.; Melanoma; | |
| | | | Ovarian; Uterine | |
| CTWKLPTLAK | HLA-A11:01 | PRAME | Lung | 6111 |
| | | | squam.; Melanoma; | |
| | | | Ovarian; Uterine | |
| ISMSVWTSPR | HLA-A11:01 | PRAME | Lung | 6112 |
| | | | squam.; Melanoma; | |
| | | | Ovarian; Uterine | |
| YVDSLFFLR | HLA-A11:01 | PRAME | Lung | 6113 |
| | | | squam.; Melanoma; | |
| | | | Ovarian; Uterine | |
| EVLVDLFLK | HLA-A11:01 | PRAME | Lung | 6114 |
| | | | squam.; Melanoma; | |
| | | | Ovarian; Uterine | |
| ELFSYLIEK | HLA-A11:01 | PRAME | Lung | 6115 |
| | | | squam.; Melanoma; | |
| | | | Ovarian; Uterine | |
| QYIAQFTSQF | HLA-A24:02 | PRAME | Lung | 6116 |
| | | | squam.; Melanoma; | |
| | | | Ovarian; Uterine | |
| RWLLHHSWVW | HLA-A24:02 | PRAME | Lung | 6117 |
| | | | squam.; Melanoma; | |
| | | | Ovarian; Uterine | |
| TWKLPTLAKF | HLA-A24:02 | PRAME | Lung | 6118 |
| | | | squam.; Melanoma; | |
| | | | Ovarian; Uterine | |
| LYVDSLFFL | HLA-A24:02 | PRAME | Lung | 6119 |
| | | | squam.; Melanoma; | |
| | | | Ovarian; Uterine | |
| PYLGQMINL | HLA-A24:02 | PRAME | Lung | 6120 |
| | | | squam.; Melanoma; | |
| | | | Ovarian; Uterine | |
| SYEDIHGTL | HLA-A24:02 | PRAME | Lung | 6121 |
| | | | squam.; Melanoma; | |
| | | | Ovarian; Uterine | |
| QSRYISMSV | HLA-A30:01 | PRAME | Lung | 6122 |
| | | | squam.; Melanoma; | |
| | | | Ovarian; Uterine | |
| KLKIPAMPM | HLA-A30:01 | PRAME | Lung | 6123 |
| | | | squam.; Melanoma; | |
| | | | Ovarian; Uterine | |
| IQSRYISMSV | HLA-A30:01 | PRAME | Lung | 6124 |
| | | | squam.; Melanoma; | |
| | | | Ovarian; Uterine | |
| ASSYISPEK | HLA-A30:01 | PRAME | Lung | 6125 |
| | | | squam.; Melanoma; | |
| | | | Ovarian; Uterine | |
| TWKLPTLAK | HLA-A30:01 | PRAME | Lung | 6126 |
| | | | squam.; Melanoma; | |
| | | | Ovarian; Uterine | |
| RLRELLCEL | HLA-A30:01 | PRAME | Lung | 6127 |
| | | | squam.; Melanoma; | |
| | | | Ovarian; Uterine | |
| HSWVWVPFR | HLA-A33:03 | PRAME | Lung | 6128 |
| | | | squam.; Melanoma; | |
| | | | Ovarian; Uterine | |
| SMSVWTSPR | HLA-A33:03 | PRAME | Lung | 6129 |
| | | | squam.; Melanoma; | |
| | | | Ovarian; Uterine | |
| ISMSVWTSPR | HLA-A33:03 | PRAME | Lung | 6130 |
| | | | squam.; Melanoma; | |
| | | | Ovarian; Uterine | |
| ETLSITNCR | HLA-A33:03 | PRAME | Lung | 6131 |
| | | | squam.; Melanoma; | |
| | | | Ovarian; Uterine | |
| DSLFFLRGR | HLA-A33:03 | PRAME | Lung | 6132 |
| | | | squam.; Melanoma; | |
| | | | Ovarian; Uterine | |
| YVDSLFFLR | HLA-A33:03 | PRAME | Lung | 6133 |
| | | | squam.; Melanoma; | |
| | | | Ovarian; Uterine | |
| RPRRWKLQVL | HLA-B07:02 | PRAME | Lung | 6134 |
| | | | squam.; Melanoma; | |
| | | | Ovarian; Uterine | |
| LPRGLGRWL | HLA-B07:02 | PRAME | Lung | 6135 |
| | | | squam.; Melanoma; | |
| | | | Ovarian; Uterine | |
| RPRRWKLQV | HLA-B07:02 | PRAME | Lung | 6136 |
| | | | squam.; Melanoma; | |
| | | | Ovarian; Uterine | |
| LPRELFPPL | HLA-B07:02 | PRAME | Lung | 6137 |
| | | | squam.; Melanoma; | |
| | | | Ovarian; Uterine | |
| SPYLGQMINL | HLA-B07:02 | PRAME | Lung | 6138 |
| | | | squam.; Melanoma; | |
| | | | Ovarian; Uterine | |
| SPSVSQLSVL | HLA-B07:02 | PRAME | Lung | 6139 |
| | | | squam.; Melanoma; | |
| | | | Ovarian; Uterine | |
| YLHARLREL | HLA-B08:01 | PRAME | Lung | 6140 |
| | | | squam.; Melanoma; | |
| | | | Ovarian; Uterine | |
| MINLRRLLL | HLA-B08:01 | PRAME | Lung | 6141 |
| | | | squam.; Melanoma; | |
| | | | Ovarian; Uterine | |
| FLRGRLDQL | HLA-B08:01 | PRAME | Lung | 6142 |
| | | | squam.; Melanoma; | |
| | | | Ovarian; Uterine | |
| KVKRKKNVL | HLA-B08:01 | PRAME | Lung | 6143 |
| | | | squam.; Melanoma; | |
| | | | Ovarian; Uterine | |
| REYELQEALI | HLA-B13:02 | PRAME | Lung | 6144 |
| | | | squam.; Melanoma; | |
| | | | Ovarian; Uterine | |
| CDELFSYLI | HLA-B13:02 | PRAME | Lung | 6145 |
| | | | squam.; Melanoma; | |
| | | | Ovarian; Uterine | |
| LQSLLQHLI | HLA-B13:02 | PRAME | Lung | 6146 |
| | | | squam.; Melanoma; | |
| | | | Ovarian; Uterine | |
| AEQPFIPVEV | HLA-B13:02 | PRAME | Lung | 6147 |
| | | | squam.; Melanoma; | |
| | | | Ovarian; Uterine | |
| EQPFIPVEV | HLA-B13:02 | PRAME | Lung | 6148 |
| | | | squam.; Melanoma; | |
| | | | Ovarian; Uterine | |
| RLCCKKLKI | HLA-B13:02 | PRAME | Lung | 6149 |
| | | | squam.; Melanoma; | |
| | | | Ovarian; Uterine | |
| RLWGSIQSR | HLA-B13:02 | PRAME | Lung | 6150 |
| | | | squam.; Melanoma; | |
| | | | Ovarian; Uterine | |
| YIAQFTSQF | HLA-B46:01 | PRAME | Lung | 6151 |
| | | | squam.; Melanoma; | |
| | | | Ovarian; Uterine | |
| LSHIHASSY | HLA-B46:01 | PRAME | Lung | 6152 |
| | | | squam.; Melanoma; | |
| | | | Ovarian; Uterine | |
| FAMPMQDIKM | HLA-B46:01 | PRAME | Lung | 6153 |
| | | | squam.; Melanoma; | |
| | | | Ovarian; Uterine | |
| VLYPVPLESY | HLA-B46:01 | PRAME | Lung | 6154 |
| | | | squam.; Melanoma; | |
| | | | Ovarian; Uterine | |
| AAFDGRHSQ | HLA-B46:01 | PRAME | Lung | 6155 |
| | | | squam.; Melanoma; | |
| | | | Ovarian; Uterine | |
| VSPEPLQAL | HLA-C01:02 | PRAME | Lung | 6156 |
| | | | squam.; Melanoma; | |
| | | | Ovarian; Uterine | |
| YLHARLREL | HLA-C01:02 | PRAME | Lung | 6157 |
| | | | squam.; Melanoma; | |
| | | | Ovarian; Uterine | |
| ITDDQLLAL | HLA-C01:02 | PRAME | Lung | 6158 |
| | | | squam.; Melanoma; | |
| | | | Ovarian; Uterine | |
| TSPRRLVEL | HLA-C01:02 | PRAME | Lung | 6159 |
| | | | squam.; Melanoma; | |
| | | | Ovarian; Uterine | |
| AWPFTCLPL | HLA-C01:02 | PRAME | Lung | 6160 |
| | | | squam.; Melanoma; | |
| | | | Ovarian; Uterine | |
| ISISALQSL | HLA-C03:04 | PRAME | Lung | 6161 |
| | | | squam.; Melanoma; | |
| | | | Ovarian; Uterine | |
| LAIAALELL | HLA-C03:04 | PRAME | Lung | 6162 |
| | | | squam.; Melanoma; | |
| | | | Ovarian; Uterine | |
| HVMNPLETL | HLA-C03:04 | PRAME | Lung | 6163 |
| | | | squam.; Melanoma; | |
| | | | Ovarian; Uterine | |
| LAIAALEL | HLA-C03:04 | PRAME | Lung | 6164 |
| | | | squam.; Melanoma; | |
| | | | Ovarian; Uterine | |
| FTSQFLSL | HLA-C03:04 | PRAME | Lung | 6165 |
| | | | squam.; Melanoma; | |
| | | | Ovarian; Uterine | |
| FYDPEPILCPCF | HLA-C04:01 | PRAME | Lung | 6166 |
| | | | squam.; Melanoma; | |
| | | | Ovarian; Uterine | |
| SYEDIHGTL | HLA-C04:01 | PRAME | Lung | 6167 |
| | | | squam.; Melanoma; | |
| | | | Ovarian; Uterine | |
| HHSWVWVPF | HLA-C04:01 | PRAME | Lung | 6168 |
| | | | squam.; Melanoma; | |
| | | | Ovarian; Uterine | |
| FYDPEPILC | HLA-C04:01 | PRAME | Lung | 6169 |
| | | | squam.; Melanoma; | |
| | | | Ovarian; Uterine | |
| FYDPEPIL | HLA-C04:01 | PRAME | Lung | 6170 |
| | | | squam.; Melanoma; | |
| | | | Ovarian; Uterine | |
| VFDECGITD | HLA-C04:01 | PRAME | Lung | 6171 |
| | | | squam.; Melanoma; | |
| | | | Ovarian; Uterine | |
| YLHARLREL | HLA-C07:01 | PRAME | Lung | 6172 |
| | | | squam.; Melanoma; | |
| | | | Ovarian; Uterine | |
| KRKKNVLRL | HLA-C07:01 | PRAME | Lung | 6173 |
| | | | squam.; Melanoma; | |
| | | | Ovarian; Uterine | |
| SFYGNSISI | HLA-C07:01 | PRAME | Lung | 6174 |
| | | | squam.; Melanoma; | |
| | | | Ovarian; Uterine | |
| LHLERLAYL | HLA-C07:01 | PRAME | Lung | 6175 |
| | | | squam.; Melanoma; | |
| | | | Ovarian; Uterine | |
| RRWKLQVL | HLA-C07:01 | PRAME | Lung | 6176 |
| | | | squam.; Melanoma; | |
| | | | Ovarian; Uterine | |
| RRWKLQVLDL | HLA-C07:01 | PRAME | Lung | 6177 |
| | | | squam.; Melanoma; | |
| | | | Ovarian; Uterine | |
| YLHARLREL | HLA-C07:02 | PRAME | Lung | 6178 |
| | | | squam.; Melanoma; | |
| | | | Ovarian; Uterine | |
| LYVDSLFFL | HLA-C07:02 | PRAME | Lung | 6179 |
| | | | squam.; Melanoma; | |
| | | | Ovarian; Uterine | |
| LHLERLAYL | HLA-C07:02 | PRAME | Lung | 6180 |
| | | | squam.; Melanoma; | |
| | | | Ovarian; Uterine | |
| KRKKNVLRL | HLA-C07:02 | PRAME | Lung | 6181 |
| | | | squam.; Melanoma; | |
| | | | Ovarian; Uterine | |
| FYDPEPIL | HLA-C07:02 | PRAME | Lung | 6182 |
| | | | squam.; Melanoma; | |
| | | | Ovarian; Uterine | |
| SYEDIHGTL | HLA-C07:02 | PRAME | Lung | 6183 |
| | | | squam.; Melanoma; | |
| | | | Ovarian; Uterine | |
| KSSANWMRY | HLA-A01:01 | PRDM7 | Melanoma | 6184 |
| LSEPQDDDY | HLA-A01:01 | PRDM7 | Melanoma | 6185 |
| ISEPQDDDYLY | HLA-A01:01 | PRDM7 | Melanoma | 6186 |
| ITEDEEAANSGY | HLA-A01:01 | PRDM7 | Melanoma | 6187 |
| ASDLPLGLH | HLA-A01:01 | PRDM7 | Melanoma | 6188 |
| YLYCEMCQNFFI | HLA-A02:01 | PRDM7 | Melanoma | 6189 |
| NMWNAITPL | HLA-A02:01 | PRDM7 | Melanoma | 6190 |
| KMNYNALITY | HLA-A02:01 | PRDM7 | Melanoma | 6191 |
| FSVNMWNAITPL | HLA-A02:01 | PRDM7 | Melanoma | 6192 |
| SLLSELPRTI | HLA-A02:01 | PRDM7 | Melanoma | 6193 |
| VLLMGPLHL | HLA-A02:01 | PRDM7 | Melanoma | 6194 |
| VNMWNAITPL | HLA-A02:01 | PRDM7 | Melanoma | 6195 |
| SMSLMLSGL | HLA-A02:01 | PRDM7 | Melanoma | 6196 |
| SLLSELPRT | HLA-A02:01 | PRDM7 | Melanoma | 6197 |
| LMLSGLEKSKI | HLA-A02:01 | PRDM7 | Melanoma | 6198 |
| ALITVGLRA | HLA-A02:01 | PRDM7 | Melanoma | 6199 |
| LLSELPRTI | HLA-A02:01 | PRDM7 | Melanoma | 6200 |
| LLMGPLHL | HLA-A02:01 | PRDM7 | Melanoma | 6201 |
| ELSGTPNLL | HLA-A02:01 | PRDM7 | Melanoma | 6202 |
| SLRELSGTPNL | HLA-A02:01 | PRDM7 | Melanoma | 6203 |
| SGDEYGQEL | HLA-A02:01 | PRDM7 | Melanoma | 6204 |
| MSLMLSGLFK | HLA-A03:01 | PRDM7 | Melanoma | 6205 |
| SLMLSGLFK | HLA-A03:01 | PRDM7 | Melanoma | 6206 |
| KMYSLRERK | HLA-A03:01 | PRDM7 | Melanoma | 6207 |
| ILIHAAVMTK | HLA-A03:01 | PRDM7 | Melanoma | 6208 |
| SGYSWLITK | HLA-A03:01 | PRDM7 | Melanoma | 6209 |
| AVMTKPKVK | HLA-A03:01 | PRDM7 | Melanoma | 6210 |
| SELPRTICK | HLA-A03:01 | PRDM7 | Melanoma | 6211 |
| MSLMLSGLFK | HLA-A11:01 | PRDM7 | Melanoma | 6212 |
| SLMLSGLFK | HLA-A11:01 | PRDM7 | Melanoma | 6213 |
| SSANWMRTK | HLA-A11:01 | PRDM7 | Melanoma | 6214 |
| SGYSWLITK | HLA-A11:01 | PRDM7 | Melanoma | 6215 |
| AVMTKPKVK | HLA-A11:01 | PRDM7 | Melanoma | 6216 |
| AHGPPTFVK | HLA-A11:01 | PRDM7 | Melanoma | 6217 |
| LYCEMCQNF | HLA-A24:02 | PRDM7 | Melanoma | 6218 |
| YLYCEMCQNF | HLA-A24:02 | PRDM7 | Melanoma | 6219 |
| LYCEMCQNFF | HLA-A24:02 | PRDM7 | Melanoma | 6220 |
| HVPHAVWPF | HLA-A24:02 | PRDM7 | Melanoma | 6221 |
| VWPFQVKNF | HLA-A24:02 | PRDM7 | Melanoma | 6222 |
| AFKDISIYF | HLA-A24:02 | PRDM7 | Melanoma | 6223 |
| RIRSGNILI | HLA-A30:01 | PRDM7 | Melanoma | 6224 |
| KTRYRNVKM | HLA-A30:01 | PRDM7 | Melanoma | 6225 |
| RCVRTSSLTA | HLA-A30:01 | PRDM7 | Melanoma | 6226 |
| RTKARDPSM | HLA-A30:01 | PRDM7 | Melanoma | 6227 |
| RYRNVKMNY | HLA-A30:01 | PRDM7 | Melanoma | 6228 |
| AFKDISIYF | HLA-A30:01 | PRDM7 | Melanoma | 6229 |
| RLKLELRRK | HLA-A30:01 | PRDM7 | Melanoma | 6230 |
| HAVWPFQVK | HLA-A30:01 | PRDM7 | Melanoma | 6231 |
| QVKPPWMAFR | HLA-A33:03 | PRDM7 | Melanoma | 6232 |
| WMRYVNCAR | HLA-A33:03 | PRDM7 | Melanoma | 6233 |
| FQYHRQIFYR | HLA-A33:03 | PRDM7 | Melanoma | 6234 |
| NLVAFQYHR | HLA-A33:03 | PRDM7 | Melanoma | 6235 |
| EMGDWEKTRYR | HLA-A33:03 | PRDM7 | Melanoma | 6236 |
| QYHRQIFYR | HLA-A33:03 | PRDM7 | Melanoma | 6237 |
| YSWLITKGR | HLA-A33:03 | PRDM7 | Melanoma | 6238 |
| EMGDWEKTR | HLA-A33:03 | PRDM7 | Melanoma | 6239 |
| HPNRSALSL | HLA-B07:02 | PRDM7 | Melanoma | 6240 |
| RPAFMCHRRQAI | HLA-B07:02 | PRDM7 | Melanoma | 6241 |
| KARDPSMSL | HLA-B07:02 | PRDM7 | Melanoma | 6242 |
| LPRGSESGAAL | HLA-B07:02 | PRDM7 | Melanoma | 6243 |
| GPSGIPQAGL | HLA-B07:02 | PRDM7 | Melanoma | 6244 |
| KPMVSEPL | HLA-B07:02 | PRDM7 | Melanoma | 6245 |
| IPQAGLGVW | HLA-B07:02 | PRDM7 | Melanoma | 6246 |
| FMCHRRQAI | HLA-B08:01 | PRDM7 | Melanoma | 6247 |
| NVKMNYNAL | HLA-B08:01 | PRDM7 | Melanoma | 6248 |
| IVRCVRTSSL | HLA-B08:01 | PRDM7 | Melanoma | 6249 |
| WMRTKARDPSM | HLA-B08:01 | PRDM7 | Melanoma | 6250 |
| HSRLKLEL | HLA-B08:01 | PRDM7 | Melanoma | 6251 |
| NALITVGL | HLA-B08:01 | PRDM7 | Melanoma | 6252 |
| DGKDKSSA | HLA-B08:01 | PRDM7 | Melanoma | 6253 |
| CEMCQNFFI | HLA-B13:02 | PRDM7 | Melanoma | 6254 |
| YCEMCQNFFI | HLA-B13:02 | PRDM7 | Melanoma | 6255 |
| MNYNALITV | HLA-B13:02 | PRDM7 | Melanoma | 6256 |
| YLYCEMCQNFFI | HLA-B13:02 | PRDM7 | Melanoma | 6257 |
| EQSKHQKI | HLA-B13:02 | PRDM7 | Melanoma | 6258 |
| RQIFYRTCRV | HLA-B13:02 | PRDM7 | Melanoma | 6259 |
| RSIHVPHAV | HLA-B13:02 | PRDM7 | Melanoma | 6260 |
| RQAIKLQV | HLA-B13:02 | PRDM7 | Melanoma | 6261 |
| FSVNMWNAI | HLA-B46:01 | PRDM7 | Melanoma | 6262 |
| FTKEEWAEM | HLA-B46:01 | PRDM7 | Melanoma | 6263 |
| MSLMLSGLF | HLA-B46:01 | PRDM7 | Melanoma | 6264 |
| FQVKNFSVNM | HLA-B46:01 | PRDM7 | Melanoma | 6265 |
| QVKPPWMAF | HLA-B46:01 | PRDM7 | Melanoma | 6266 |
| KARDPSMSL | HLA-B46:01 | PRDM7 | Melanoma | 6267 |
| SSIEPAESI | HLA-B46:01 | PRDM7 | Melanoma | 6268 |
| SLRERKGHAY | HLA-B46:01 | PRDM7 | Melanoma | 6269 |
| RTSSLTAVI | HLA-C01:02 | PRDM7 | Melanoma | 6270 |
| KARDPSMSL | HLA-C01:02 | PRDM7 | Melanoma | 6271 |
| FSVNMWNAI | HLA-C01:02 | PRDM7 | Melanoma | 6272 |
| RVIRPGCEL | HLA-C01:02 | PRDM7 | Melanoma | 6273 |
| TSPTRESL | HLA-C01:02 | PRDM7 | Melanoma | 6274 |
| MSPERSQEE | HLA-C01:02 | PRDM7 | Melanoma | 6275 |
| KIPMKNGHL | HLA-C01:02 | PRDM7 | Melanoma | 6276 |
| KGHPNRSAL | HLA-C01:02 | PRDM7 | Melanoma | 6277 |
| FSVNMWNAI | HLA-C03:04 | PRDM7 | Melanoma | 6278 |
| SSIEPAESL | HLA-C03:04 | PRDM7 | Melanoma | 6279 |
| ASENNESSL | HLA-C03:04 | PRDM7 | Melanoma | 6280 |
| KARDPSMSL | HLA-C03:04 | PRDM7 | Melanoma | 6281 |
| CAAHGPPTF | HLA-C03:04 | PRDM7 | Melanoma | 6282 |
| AANSGYSWL | HLA-C03:04 | PRDM7 | Melanoma | 6283 |
| ARDPSMSLM | HLA-C04:01 | PRDM7 | Melanoma | 6284 |
| RTSSLTAVL | HLA-C04:01 | PRDM7 | Melanoma | 6285 |
| AFKDISIYF | HLA-C04:01 | PRDM7 | Melanoma | 6286 |
| KARDPSMSL | HLA-C04:01 | PRDM7 | Melanoma | 6287 |
| VWNEASDL | HLA-C04:01 | PRDM7 | Melanoma | 6288 |
| SFNNESSL | HLA-C04:01 | PRDM7 | Melanoma | 6289 |
| SGDEYGQEL | HLA-C04:01 | PRDM7 | Melanoma | 6290 |
| LYCEMCQNFF | HLA-C04:01 | PRDM7 | Melanoma | 6291 |
| LRATRPAFM | HLA-C07:01 | PRDM7 | Melanoma | 6292 |
| SSANWMRYV | HLA-C07:01 | PRDM7 | Melanoma | 6293 |
| ARDPSMSLM | HLA-C07:01 | PRDM7 | Melanoma | 6294 |
| IRIRSGNIL | HLA-C07:01 | PRDM7 | Melanoma | 6295 |
| GRNCYEYVD | HLA-C07:01 | PRDM7 | Melanoma | 6296 |
| HRQIFYRTC | HLA-C07:01 | PRDM7 | Melanoma | 6297 |
| ARDPSMSL | HLA-C07:01 | PRDM7 | Melanoma | 6298 |
| ARDDEEQNL | HLA-C07:01 | PRDM7 | Melanoma | 6299 |
| LRATRPAFM | HLA-C07:02 | PRDM7 | Melanoma | 6300 |
| ARDPSMSLM | HLA-C07:02 | PRDM7 | Melanoma | 6301 |
| IRIRSGNIL | HLA-C07:02 | PRDM7 | Melanoma | 6302 |
| FQYHRQIFY | HLA-C07:02 | PRDM7 | Melanoma | 6303 |
| ARDPSMSL | HLA-C07:02 | PRDM7 | Melanoma | 6304 |
| IRPGCELL | HLA-C07:02 | PRDM7 | Melanoma | 6305 |
| VKPPWMAF | HLA-C07:02 | PRDM7 | Melanoma | 6306 |
| ARDDEEQNL | HLA-C07:02 | PRDM7 | Melanoma | 6307 |
| CRSQSRSRYY | HLA-A01:01 | PRM1 | Testis | 6308 |
| RSQSRSRYY | HLA-A01:01 | PRM1 | Testis | 6309 |
| CCRSQSRSRYY | HLA-A01:01 | PRM1 | Testis | 6310 |
| RSQSRSRY | HLA-A01:01 | PRM1 | Testis | 6311 |
| SQSRSRYY | HLA-A01:01 | PRM1 | Testis | 6312 |
| RAMRCCRPRY | HLA-A02:01 | PRM1 | Testis | 6313 |
| RAMRCCRPR | HLA-A02:01 | PRM1 | Testis | 6314 |
| AMRCCRPRY | HLA-A02:01 | PRM1 | Testis | 6315 |
| AMRCCRPRYR | HLA-A02:01 | PRM1 | Testis | 6316 |
| SQSRSRYYR | HLA-A02:01 | PRM1 | Testis | 6317 |
| RRAMRCCRPR | HLA-A02:01 | PRM1 | Testis | 6318 |
| RSQSRSRYYR | HLA-A02:01 | PRM1 | Testis | 6319 |
| CQTRRRAMRQ | HLA-A02:01 | PRM1 | Testis | 6320 |
| RAMRCCRPRYR | HLA-A02:01 | PRM1 | Testis | 6321 |
| MRCCRPRYR | HLA-A02:01 | PRM1 | Testis | 6322 |
| SCQTRRRAM | HLA-A02:01 | PRM1 | Testis | 6323 |
| RSCQTRRRA | HLA-A02:01 | PRM1 | Testis | 6324 |
| SRYYRQRQR | HLA-A02:01 | PRM1 | Testis | 6325 |
| YRCCRSQSR | HLA-A02:01 | PRM1 | Testis | 6326 |
| RYYRQRQRS | HLA-A02:01 | PRM1 | Testis | 6327 |
| RSQSRSRYY | HLA-A02:01 | PRM1 | Testis | 6328 |
| SCQTRRRA | HLA-A02:01 | PRM1 | Testis | 6329 |
| RAMRCCRPRY | HLA-A03:01 | PRM1 | Testis | 6330 |
| AMRCCRPRYR | HLA-A03:01 | PRM1 | Testis | 6331 |
| AMRCCRPRY | HLA-A03:01 | PRM1 | Testis | 6332 |
| RSQSRSRYY | HLA-A03:01 | PRM1 | Testis | 6333 |
| SRYYRQRQR | HLA-A03:01 | PRM1 | Testis | 6334 |
| RQRSRRRRR | HLA-A03:01 | PRM1 | Testis | 6335 |
| SQSRSRYYR | HLA-A11:01 | PRM1 | Testis | 6336 |
| RSQSRSRYYR | HLA-A11:01 | PRM1 | Testis | 6337 |
| RAMRCCRPR | HLA-A11:01 | PRM1 | Testis | 6338 |
| SRYYRQRQR | HLA-A11:01 | PRM1 | Testis | 6339 |
| RYYRQRQRS | HLA-A24:02 | PRM1 | Testis | 6340 |
| RYRCCRSQSR | HLA-A24:02 | PRM1 | Testis | 6341 |
| RYYRQRQRSR | HLA-A24:02 | PRM1 | Testis | 6342 |
| RYRPRCRRH | HLA-A24:02 | PRM1 | Testis | 6343 |
| YYRQRQRSR | HLA-A24:02 | PRM1 | Testis | 6344 |
| RYRCCRSQS | HLA-A30:01 | PRM1 | Testis | 6345 |
| RSRYYRQRQ | HLA-A30:01 | PRM1 | Testis | 6346 |
| RSRRRRRRS | HLA-A30:01 | PRM1 | Testis | 6347 |
| RSQSRSRYY | HLA-A30:01 | PRM1 | Testis | 6348 |
| RQRSRRRRR | HLA-A30:01 | PRM1 | Testis | 6349 |
| RSRYYRQR | HLA-A30:01 | PRM1 | Testis | 6350 |
| SQSRSRYYR | HLA-A33:03 | PRM1 | Testis | 6351 |
| RSQSRSRYYR | HLA-A33:03 | PRM1 | Testis | 6352 |
| AMRCCRPRYR | HLA-A33:03 | PRM1 | Testis | 6353 |
| RAMRCCRPR | HLA-A33:03 | PRM1 | Testis | 6354 |
| YYRQRQRSR | HLA-A33:03 | PRM1 | Testis | 6355 |
| SRYYRQRQR | HLA-A33:03 | PRM1 | Testis | 6356 |
| RYYRQRQR | HLA-A33:03 | PRM1 | Testis | 6357 |
| RSCQTRRRAM | HLA-B07:02 | PRM1 | Testis | 6358 |
| RPRYRPRC | HLA-B07:02 | PRM1 | Testis | 6359 |
| SCQTRRRAM | HLA-B07:02 | PRM1 | Testis | 6360 |
| RPRYRPRCR | HLA-B07:02 | PRM1 | Testis | 6361 |
| RPRYRPRCRR | HLA-B07:02 | PRM1 | Testis | 6362 |
| CQTRRRAM | HLA-B08:01 | PRM1 | Testis | 6363 |
| SCQTRRRAM | HLA-B08:01 | PRM1 | Testis | 6364 |
| MARYRCCRS | HLA-B08:01 | PRM1 | Testis | 6365 |
| SRRRRRRSC | HLA-B08:01 | PRM1 | Testis | 6366 |
| YYRQRQRSR | HLA-B08:01 | PRM1 | Testis | 6367 |
| RAMRCCRPRY | HLA-B13:02 | PRM1 | Testis | 6368 |
| AMRCCRPRY | HLA-B13:02 | PRM1 | Testis | 6369 |
| RAMRCCRPRYRP | HLA-B13:02 | PRM1 | Testis | 6370 |
| RYYRQRQRS | HLA-B13:02 | PRM1 | Testis | 6371 |
| RQRQRSRRR | HLA-B13:02 | PRM1 | Testis | 6372 |
| RQRSRRRRR | HLA-B13:02 | PRM1 | Testis | 6373 |
| RAMRCCRPRY | HLA-B46:01 | PRM1 | Testis | 6374 |
| RSQSRSRYY | HLA-B46:01 | PRM1 | Testis | 6375 |
| AMRCCRPRY | HLA-B46:01 | PRM1 | Testis | 6376 |
| RSQSRSRY | HLA-B46:01 | PRM1 | Testis | 6377 |
| RSQSRSRYY | HLA-C01:02 | PRM1 | Testis | 6378 |
| RSCQTRRRAM | HLA-C01:02 | PRM1 | Testis | 6379 |
| RAMRCCRPR | HLA-C01:02 | PRM1 | Testis | 6380 |
| AMRCCRPRY | HLA-C01:02 | PRM1 | Testis | 6381 |
| SCQTRRRAM | HLA-C01:02 | PRM1 | Testis | 6382 |
| RSQSRSRYY | HLA-C03:04 | PRM1 | Testis | 6383 |
| RAMRCCRPR | HLA-C03:04 | PRM1 | Testis | 6384 |
| RAMRCCRPRY | HLA-C03:04 | PRM1 | Testis | 6385 |
| SCQTRRRAM | HLA-C03:04 | PRM1 | Testis | 6386 |
| CQTRRRAM | HLA-C03:04 | PRM1 | Testis | 6387 |
| RAMRCCRPR | HLA-C04:01 | PRM1 | Testis | 6388 |
| SQSRSRYYR | HLA-C04:01 | PRM1 | Testis | 6389 |
| RSQSRSRYY | HLA-C04:01 | PRM1 | Testis | 6390 |
| RYRPRCRRH | HLA-C04:01 | PRM1 | Testis | 6391 |
| YYRQRQRS | HLA-C04:01 | PRM1 | Testis | 6392 |
| RYRPRCRR | HLA-C04:01 | PRM1 | Testis | 6393 |
| CRSQSRSRY | HLA-C07:01 | PRM1 | Testis | 6394 |
| CRSQSRSRYY | HLA-C07:01 | PRM1 | Testis | 6395 |
| RSQSRSRYY | HLA-C07:01 | PRM1 | Testis | 6396 |
| SRYYRQRQR | HLA-C07:01 | PRM1 | Testis | 6397 |
| CRSQSRSRY | HLA-C07:02 | PRM1 | Testis | 6398 |
| RSQSRSRYY | HLA-C07:02 | PRM1 | Testis | 6399 |
| YYRQRQRSR | HLA-C07:02 | PRM1 | Testis | 6400 |
| YRPRCRRH | HLA-C07:02 | PRM1 | Testis | 6401 |
| YRQRQRSR | HLA-C07:02 | PRM1 | Testis | 6402 |
| LSERSHEVY | HLA-A01:01 | PRM2 | Testis | 6403 |
| SLSERSHEVY | HLA-A01:01 | PRM2 | Testis | 6404 |
| LSPEHVEVY | HLA-A01:01 | PRM2 | Testis | 6405 |
| LGDPLNQNF | HLA-A01:01 | PRM2 | Testis | 6406 |
| SLSERSHEV | HLA-A02:01 | PRM2 | Testis | 6407 |
| GLSPEHVEV | HLA-A02:01 | PRM2 | Testis | 6408 |
| RSLSERSHEV | HLA-A02:01 | PRM2 | Testis | 6409 |
| QGLSPEHVEV | HLA-A02:01 | PRM2 | Testis | 6410 |
| KLPGPLTPSWKL | HLA-A02:01 | PRM2 | Testis | 6411 |
| SLGDPLNQNFL | HLA-A02:01 | PRM2 | Testis | 6412 |
| KLPGPLTPS | HLA-A02:01 | PRM2 | Testis | 6413 |
| QLSPEHVEVY | HLA-A02:01 | PRM2 | Testis | 6414 |
| SLSERSHEVY | HLA-A02:01 | PRM2 | Testis | 6415 |
| SLGDPLNQN | HLA-A02:01 | PRM2 | Testis | 6416 |
| FLSQKAAEP | HLA-A02:01 | PRM2 | Testis | 6417 |
| SLGDPLNQNF | HLA-A02:01 | PRM2 | Testis | 6418 |
| SLGDPLNQ | HLA-A02:01 | PRM2 | Testis | 6419 |
| KLPGPLTPSWK | HLA-A03:01 | PRM2 | Testis | 6420 |
| RTHGQSHYR | HLA-A03:01 | PRM2 | Testis | 6421 |
| LTPSWKLRK | HLA-A03:01 | PRM2 | Testis | 6422 |
| KLPGPLTPS | HLA-A03:01 | PRM2 | Testis | 6423 |
| RTHGQSHYR | HLA-A11:01 | PRM2 | Testis | 6424 |
| LTPSWKLRK | HLA-A11:01 | PRM2 | Testis | 6425 |
| RTHGQSHYRR | HLA-ALL:01 | PRM2 | Testis | 6426 |
| KLPGPLTPSW | HLA-A24:02 | PRM2 | Testis | 6427 |
| SLGDPLNQNF | HLA-A24:02 | PRM2 | Testis | 6428 |
| KLPGPLTPSWKL | HLA-A24:02 | PRM2 | Testis | 6429 |
| LGDPLNQNF | HLA-A24:02 | PRM2 | Testis | 6430 |
| KSRPKHQVR | HLA-A30:01 | PRM2 | Testis | 6431 |
| RYRVRSLSE | HLA-A30:01 | PRM2 | Testis | 6432 |
| RTRKRTCRR | HLA-A30:01 | PRM2 | Testis | 6433 |
| RSHEVYRQQ | HLA-A30:01 | PRM2 | Testis | 6434 |
| RSHEVYRQQL | HLA-A30:01 | PRM2 | Testis | 6435 |
| RTHGQSHYR | HLA-A33:03 | PRM2 | Testis | 6436 |
| HYRRRHCSR | HLA-A33:03 | PRM2 | Testis | 6437 |
| ERTHGQSHYR | HLA-A33:03 | PRM2 | Testis | 6438 |
| EHVEVYER | HLA-A33:03 | PRM2 | Testis | 6439 |
| EVYERTHGQ | HLA-A33:03 | PRM2 | Testis | 6440 |
| MVRYRVRSL | HLA-B07:02 | PRM2 | Testis | 6441 |
| GPLTPSWKI | HLA-B07:02 | PRM2 | Testis | 6442 |
| LPGPLTPSWKL | HLA-B07:02 | PRM2 | Testis | 6443 |
| LPGPLTPSW | HLA-B07:02 | PRM2 | Testis | 6444 |
| MVRYRVRSI | HLA-B08:01 | PRM2 | Testis | 6445 |
| MVRYRVRSLS | HLA-B08:01 | PRM2 | Testis | 6446 |
| VRYRVRSL | HLA-B08:01 | PRM2 | Testis | 6447 |
| CSRRRLHRI | HLA-B08:01 | PRM2 | Testis | 6448 |
| SLSERSHEV | HLA-B08:01 | PRM2 | Testis | 6449 |
| DPLNQNFL | HLA-B08:01 | PRM2 | Testis | 6450 |
| REHAEGTKL | HLA-B13:02 | PRM2 | Testis | 6451 |
| RSLSERSHEV | HLA-B13:02 | PRM2 | Testis | 6452 |
| CSRRRLHRI | HLA-B13:02 | PRM2 | Testis | 6453 |
| GLSPEHVEV | HLA-B13:02 | PRM2 | Testis | 6454 |
| NQNFLSQKA | HLA-B13:02 | PRM2 | Testis | 6455 |
| LSPEHVEVY | HLA-B46:01 | PRM2 | Testis | 6456 |
| MVRYRVRSL | HLA-B46:01 | PRM2 | Testis | 6457 |
| LSERSHEVY | HLA-B46:01 | PRM2 | Testis | 6458 |
| YERTHGQSH | HLA-B46:01 | PRM2 | Testis | 6459 |
| KAAEPGREH | HLA-B46:01 | PRM2 | Testis | 6460 |
| MVRYRVRSL | HLA-C01:02 | PRM2 | Testis | 6461 |
| SLSERSHEV | HLA-C01:02 | PRM2 | Testis | 6462 |
| LSPEHVEVY | HLA-C01:02 | PRM2 | Testis | 6463 |
| LSPEHVEV | HLA-C01:02 | PRM2 | Testis | 6464 |
| KLPGPLTPS | HLA-C01:02 | PRM2 | Testis | 6465 |
| MVRYRVRSL | HLA-C03:04 | PRM2 | Testis | 6466 |
| SLSERSHEV | HLA-C03:04 | PRM2 | Testis | 6467 |
| LSPEHVEVY | HLA-C03:04 | PRM2 | Testis | 6468 |
| KAAEPGREH | HLA-C03:04 | PRM2 | Testis | 6469 |
| AAEPGREH | HLA-C03:04 | PRM2 | Testis | 6470 |
| LGDPLNQNF | HLA-C04:01 | PRM2 | Testis | 6471 |
| RRHCSRRRL | HLA-C04:01 | PRM2 | Testis | 6472 |
| SLSERSHEV | HLA-C04:01 | PRM2 | Testis | 6473 |
| SHEVYRQQL | HLA-C04:01 | PRM2 | Testis | 6474 |
| LSPEHVEV | HLA-C04:01 | PRM2 | Testis | 6475 |
| LGDPLNQNFL | HLA-C04:01 | PRM2 | Testis | 6476 |
| RRHCSRRRL | HLA-C07:01 | PRM2 | Testis | 6477 |
| MVRYRVRSL | HLA-C07:01 | PRM2 | Testis | 6478 |
| RRRHRRESL | HLA-C07:01 | PRM2 | Testis | 6479 |
| VRYRVRSL | HLA-C07:01 | PRM2 | Testis | 6480 |
| LSPEHVEVY | HLA-C07:01 | PRM2 | Testis | 6481 |
| RRHCSRRRL | HLA-C07:02 | PRM2 | Testis | 6482 |
| MVRYRVRSL | HLA-C07:02 | PRM2 | Testis | 6483 |
| RRRHRRESL | HLA-C07:02 | PRM2 | Testis | 6484 |
| VRYRVRSL | HLA-C07:02 | PRM2 | Testis | 6485 |
| LSPEHVEVY | HLA-C07:02 | PRM2 | Testis | 6486 |
| FSFTYTPEY | HLA-A01:01 | RBPJL | Pancreas | 6487 |
| CSDWRWLRA | HLA-A01:01 | RBPJL | Pancreas | 6488 |
| ETGPTVCGY | HLA-A01:01 | RBPJL | Pancreas | 6489 |
| DVEAETMYRY | HLA-A01:01 | RBPJL | Pancreas | 6490 |
| ATDADALLE | HLA-A01:01 | RBPJL | Pancreas | 6491 |
| ATDADALL | HLA-A01:01 | RBPJL | Pancreas | 6492 |
| SLACTLEPV | HLA-A02:01 | RBPJL | Pancreas | 6493 |
| ALLDVDEPI | HLA-A02:01 | RBPJL | Pancreas | 6494 |
| YLSGPGWRV | HLA-A02:01 | RBPJL | Pancreas | 6495 |
| SLVCVVPDV | HLA-A02:01 | RBPJL | Pancreas | 6496 |
| YLSVEDGAFV | HLA-A02:01 | RBPJL | Pancreas | 6497 |
| FSTSLACTLEPV | HLA-A02:01 | RBPJL | Pancreas | 6498 |
| SLVQLVCTV | HLA-A02:01 | RBPJL | Pancreas | 6499 |
| TSLACTLEPV | HLA-A02:01 | RBPJL | Pancreas | 6500 |
| YLCLATEKV | HLA-A02:01 | RBPJL | Pancreas | 6501 |
| ALLESIHQE | HLA-A02:01 | RBPJL | Pancreas | 6502 |
| ALLDVDEPISQL | HLA-A02:01 | RBPJL | Pancreas | 6503 |
| SLQDRSEMQL | HLA-A02:01 | RBPJL | Pancreas | 6504 |
| GLLQRLALA | HLA-A02:01 | RBPJL | Pancreas | 6505 |
| GTFHSRLIK | HLA-A03:01 | RBPJL | Pancreas | 6506 |
| RILHAKVAQK | HLA-A03:01 | RBPJL | Pancreas | 6507 |
| KVISKPSQK | HLA-A03:01 | RBPJL | Pancreas | 6508 |
| ITLPPMIIRK | HLA-A03:01 | RBPJL | Pancreas | 6509 |
| TLPPMIIRK | HLA-A03:01 | RBPJL | Pancreas | 6510 |
| GTFHSRLIK | HLA-A11:01 | RBPJL | Pancreas | 6511 |
| QTVRILHAK | HLA-ALI:01 | RBPJL | Pancreas | 6512 |
| GTYLCLATEK | HLA-A11:01 | RBPJL | Pancreas | 6513 |
| TLPPMIIRK | HLA-A11:01 | RBPJL | Pancreas | 6514 |
| RSLPGTWTR | HLA-A11:01 | RBPJL | Pancreas | 6515 |
| ITLPPMIIR | HLA-A11:01 | RBPJL | Pancreas | 6516 |
| RYGSLVQLV | HLA-A24:02 | RBPJL | Pancreas | 6517 |
| LFYPSAFSF | HLA-A24:02 | RBPJL | Pancreas | 6518 |
| RWLRAPITI | HLA-A24:02 | RBPJL | Pancreas | 6519 |
| EFTRTNFHLF | HLA-A24:02 | RBPJL | Pancreas | 6520 |
| FYPSAFSF | HLA-A24:02 | RBPJL | Pancreas | 6521 |
| SVRPGHPGV | HLA-A30:01 | RBPJL | Pancreas | 6522 |
| GTFHSRLIK | HLA-A30:01 | RBPJL | Pancreas | 6523 |
| HSRLIKVISK | HLA-A30:01 | RBPJL | Pancreas | 6524 |
| KVISKPSQK | HLA-A30:01 | RBPJL | Pancreas | 6525 |
| FCSDWRWLR | HLA-A33:03 | RBPJL | Pancreas | 6526 |
| AFCSDWRWLR | HLA-A33:03 | RBPJL | Pancreas | 6527 |
| AAFCSDWRWLR | HLA-A33:03 | RBPJL | Pancreas | 6528 |
| ESIHQEFTR | HLA-A33:03 | RBPJL | Pancreas | 6529 |
| TYTPEYSVR | HLA-A33:03 | RBPJL | Pancreas | 6530 |
| ITLPPMIIR | HLA-A33:03 | RBPJL | Pancreas | 6531 |
| CPKEANRAL | HLA-B07:02 | RBPJL | Pancreas | 6532 |
| HEPGARRRAL | HLA-B07:02 | RBPIL | Pancreas | 6533 |
| KPSQKKQSL | HLA-B07:02 | RBPJL | Pancreas | 6534 |
| APITIPMSL | HLA-B07:02 | RBPAL | Pancreas | 6535 |
| SPPGGGGTYL | HLA-B07:02 | RBPJL | Pancreas | 6536 |
| TPVPLISTL | HLA-B07:02 | RBPJL | Pancreas | 6537 |
| EPGARRRAL | HLA-B08:01 | RBPJL | Pancreas | 6538 |
| MIRKVAKQCAL | HLA-B08:01 | RBPJL | Pancreas | 6539 |
| EGYVRYGSL | HLA-B08:01 | RBPJL | Pancreas | 6540 |
| KPSQKKQSL | HLA-B08:01 | RBPJL | Pancreas | 6541 |
| NPLTHLSL | HLA-B08:01 | RBPJL | Pancreas | 6542 |
| SDWRWLRAPI | HLA-B13:02 | RBPJL | Pancreas | 6543 |
| VEFSFSTSL | HLA-B13:02 | RBPJL | Pancreas | 6544 |
| RQWAAFTLHL | HLA-B13:02 | RBPJL | Pancreas | 6545 |
| RSSPEHTTI | HLA-B13:02 | RBPJL | Pancreas | 6546 |
| YLSGPGWRV | HLA-B13:02 | RBPJL | Pancreas | 6547 |
| RLIKVISKP | HLA-B13:02 | RBPJL | Pancreas | 6548 |
| FSFTYTPEY | HLA-B46:01 | RBPJL | Pancreas | 6549 |
| CVVPDVAAF | HLA-B46:01 | RBPJL | Pancreas | 6550 |
| FTRTNFHLF | HLA-B46:01 | RBPJL | Pancreas | 6551 |
| SARQWAAF | HLA-B46:01 | RBPJL | Pancreas | 6552 |
| PPREGYVRY | HLA-B46:01 | RBPJL | Pancreas | 6553 |
| FSTSLACTL | HLA-C01:02 | RBPJL | Pancreas | 6554 |
| SSPEHTTIL | HLA-C01:02 | RBPJL | Pancreas | 6555 |
| TMYRSPRSL | HLA-C01:02 | RBPJL | Pancreas | 6556 |
| RAPITIPMSL | HLA-C01:02 | RBPJL | Pancreas | 6557 |
| VTPVPLISTL | HLA-C01:02 | RBPJL | Pancreas | 6558 |
| FSTSLACTL | HLA-C03:04 | RBPJL | Pancreas | 6559 |
| LSLQDRSEM | HLA-C03:04 | RBPJL | Pancreas | 6560 |
| LVLRGGREL | HLA-C03:04 | RBPJL | Pancreas | 6561 |
| WAAFTLHL | HLA-C03:04 | RBPJL | Pancreas | 6562 |
| LFYPSAFSF | HLA-C04:01 | RBPJL | Pancreas | 6563 |
| FYPSAFSFTY | HLA-C04:01 | RBPJL | Pancreas | 6564 |
| MYRSPRSLV | HLA-C04:01 | RBPJL | Pancreas | 6565 |
| FYPSAFSF | HLA-C04:01 | RBPJL | Pancreas | 6566 |
| ATDADALL | HLA-C04:01 | RBPJL | Pancreas | 6567 |
| TRTNFHLFI | HLA-C07:01 | RBPJL | Pancreas | 6568 |
| VRYGSLVQL | HLA-C07:01 | RBPJL | Pancreas | 6569 |
| LRAPITIPM | HLA-C07:01 | RBPJL | Pancreas | 6570 |
| KRKHFRLVL | HLA-C07:01 | RBPJL | Pancreas | 6571 |
| LRGGVRRCL | HLA-C07:01 | RBPJL | Pancreas | 6572 |
| YRSPRSLVC | HLA-C07:01 | RBPJL | Pancreas | 6573 |
| TRTNFHLFI | HLA-C07:02 | RBPJL | Pancreas | 6574 |
| LRAPITIPM | HLA-C07:02 | RBPJL | Pancreas | 6575 |
| LFYPSAPSF | HLA-C07:02 | RBPJL | Pancreas | 6576 |
| ARQWAAFTL | HLA-C07:02 | RBPJL | Pancreas | 6577 |
| FYPSAFSF | HLA-C07:02 | RBPJL | Pancreas | 6578 |
| FYPSAFSFTY | HLA-C07:02 | RBPJL | Pancreas | 6579 |
| DSNPSELKY | HLA-A01:01 | RLN1 | Prostate | 6580 |
| ADSNPSELKY | HLA-A01:01 | RLN1 | Prostate | 6581 |
| AADSNPSELKY | HLA-A01:01 | RLN1 | Prostate | 6582 |
| FLGALSKLY | HLA-A01:01 | RLN1 | Prostate | 6583 |
| CTKRSLAKY | HLA-A01:01 | RLN1 | Prostate | 6584 |
| EAADSNPSELKY | HLA-A01:01 | RLN1 | Prostate | 6585 |
| DSNLSFEEF | HLA-A01:01 | RLN1 | Prostate | 6586 |
| DTETIIMLEF | HLA-A01:01 | RLN1 | Prostate | 6587 |
| FTREFLGALS | HLA-A01:01 | RLN1 | Prostate | 6588 |
| LLEFCLLL | HLA-A01:01 | RLN1 | Prostate | 6589 |
| LLEFCLLLN | HLA-A01:01 | RLN1 | Prostate | 6590 |
| DTETIIML | HLA-A01:01 | RLN1 | Prostate | 6591 |
| AADSNPSEL | HLA-A01:01 | RLN1 | Prostate | 6592 |
| PSELKYLGL | HLA-A01:01 | RLN1 | Prostate | 6593 |
| LSERQPSLP | HLA-A01:01 | RLN1 | Prostate | 6594 |
| IMLEFIANL | HLA-A02:01 | RLN1 | Prostate | 6595 |
| FLFHLLEFCL | HLA-A02:01 | RLN1 | Prostate | 6596 |
| SLPELQQYV | HLA-A02:01 | RLN1 | Prostate | 6597 |
| HLLEFCLLL | HLA-A02:01 | RLN1 | Prostate | 6598 |
| IIMLEFIANL | HLA-A02:01 | RLN1 | Prostate | 6599 |
| FALLEPCLLL | HLA-A02:01 | RLN1 | Prostate | 6600 |
| FIANLPPEL | HLA-A02:01 | RLN1 | Prostate | 6601 |
| ALFEKCCLI | HLA-A02:01 | RLN1 | Prostate | 6602 |
| FLFHLLEFCLLL | HLA-A02:01 | RLN1 | Prostate | 6603 |
| FLFHLLEFCLL | HLA-A02:01 | RLN1 | Prostate | 6604 |
| FLFHLLEFC | HLA-A02:01 | RLN1 | Prostate | 6605 |
| LLLNQFSRAV | HLA-A02:01 | RLN1 | Prostate | 6606 |
| FIQTVSLGI | HLA-A02:01 | RLN1 | Prostate | 6607 |
| IMLEFIANLP | HLA-A02:01 | RLN1 | Prostate | 6608 |
| LFLFHLLEFCL | HLA-A02:01 | RLN1 | Prostate | 6609 |
| MLEFIANL | HLA-A02:01 | RLN1 | Prostate | 6610 |
| IIIMLEFIANL | HLA-A02:01 | RLN1 | Prostate | 6611 |
| HLLEFCLLLN | HLA-A02:01 | RLN1 | Prostate | 6612 |
| RLFLFHLLEFCL | HLA-A02:01 | RLN1 | Prostate | 6613 |
| LFLFHLLEFCLL | HLA-A02:01 | RLN1 | Prostate | 6614 |
| ALSERQPSL | HLA-A02:01 | RLN1 | Prostate | 6615 |
| LLLNQFSRA | HLA-A02:01 | RLN1 | Prostate | 6616 |
| PSLPELQQYV | HLA-A02:01 | RLN1 | Prostate | 6617 |
| YVALFEKCCLI | HLA-A02:01 | RLN1 | Prostate | 6618 |
| LLNQFSRAV | HLA-A02:01 | RLN1 | Prostate | 6619 |
| FINKDTETI | HLA-A02:01 | RLN1 | Prostate | 6620 |
| TIIMLEFIANL | HLA-A02:01 | RLN1 | Prostate | 6621 |
| KLCGRELVRA | HLA-A02:01 | RLN1 | Prostate | 6622 |
| VAGDFIQTV | HLA-A02:01 | RLN1 | Prostate | 6623 |
| ELQQYVPAL | HLA-A02:01 | RLN1 | Prostate | 6624 |
| HLLEFCLL | HLA-A02:01 | RLN1 | Prostate | 6625 |
| KWKDDVIKL | HLA-A02:01 | RLN1 | Prostate | 6626 |
| FLGALSKL | HLA-A02:01 | RLN1 | Prostate | 6627 |
| NLPPELKAA | HLA-A02:01 | RLN1 | Prostate | 6628 |
| ALFEKCCL | HLA-A02:01 | RLN1 | Prostate | 6629 |
| ALKDSNLSF | HLA-A02:01 | RLN1 | Prostate | 6630 |
| FLFHLLEF | HLA-A02:01 | RLN1 | Prostate | 6631 |
| RLFLFHLL | HLA-A02:01 | RLN1 | Prostate | 6632 |
| KLCGRELV | HLA-A02:01 | RLN1 | Prostate | 6633 |
| KLYHPSSTKI | HLA-A02:01 | RLN1 | Prostate | 6634 |
| YLGLDTHSQ | HLA-A02:01 | RLN1 | Prostate | 6635 |
| KLYHPSSTK | HLA-A03:01 | RLN1 | Prostate | 6636 |
| SKLYHPSSTK | HLA-A03:01 | RLN1 | Prostate | 6637 |
| KLYHPSSTKIQK | HLA-A03:01 | RLN1 | Prostate | 6638 |
| KLYHPSSTKI | HLA-A03:01 | RLN1 | Prostate | 6639 |
| ALSKLYEPSSTK | HLA-A03:01 | RLN1 | Prostate | 6640 |
| LSKLYHPSSTK | HLA-A03:01 | RLN1 | Prostate | 664 |
| AEIVPSFINK | HLA-A03:01 | RLN1 | Prostate | 6642 |
| AICGMSTWSK | HLA-A03:01 | RLN1 | Prostate | 6643 |
| FIANLPPELK | HLA-A03:01 | RLN1 | Prostate | 6644 |
| CLIGCTKRSLAK | HLA-A03:01 | RLN1 | Prostate | 6645 |
| EIVPSFINK | HLA-A03:01 | RLN1 | Prostate | 6646 |
| REFLGALSK | HLA-A03:01 | RLN1 | Prostate | 6647 |
| RLFLFHLLEF | HLA-A03:01 | RLN1 | Prostate | 6648 |
| RPYVALFEK | HLA-A03:01 | RLN1 | Prostate | 6649 |
| HLLEFCLLI | HLA-A03:01 | RLN1 | Prostate | 6650 |
| RLFLFHLLE | HLA-A03:01 | RLN1 | Prostate | 6651 |
| AEIVPSFINK | HLA-A11:01 | RLN1 | Prostate | 6652 |
| AICGMSTWSK | HLA-A11:01 | RLN1 | Prostate | 6653 |
| KLYHPSSTK | HLA-A11:01 | RLN1 | Prostate | 6654 |
| EIVPSFINK | HLA-A11:01 | RLN1 | Prostate | 6655 |
| FIANLPPELK | HLA-A11:01 | RLN1 | Prostate | 6656 |
| SKLYHPSSTK | HLA-A11:01 | RLN1 | Prostate | 6657 |
| LQQYVPALK | HLA-A11:01 | RLN1 | Prostate | 6658 |
| IANLPPELK | HLA-A11:01 | RLN1 | Prostate | 6659 |
| AADSNPSELK | HLA-A11:01 | RLN1 | Prostate | 6660 |
| REFLGALSK | HLA-A11:01 | RLN1 | Prostate | 6661 |
| RPYVALFEK | HLA-A11:01 | RLN1 | Prostate | 6662 |
| SNLSFEEFKK | HLA-A11:01 | RLN1 | Prostate | 6663 |
| IVPSFINK | HLA-A11:01 | RLN1 | Prostate | 6664 |
| ADSNPSELK | HLA-A11:01 | RLN1 | Prostate | 6665 |
| SNLSFEEFK | HLA-A11:01 | RLN1 | Prostate | 6666 |
| RLFLFHLLER | HLA-A24:02 | RLN1 | Prostate | 6667 |
| LFLFHLLEF | HLA-A24:02 | RLN1 | Prostate | 6668 |
| LYHPSSTKI | HLA-A24:02 | RLN1 | Prostate | 6669 |
| PYVALFEKCCLI | HLA-A24:02 | RLN1 | Prostate | 6670 |
| SFINKDTETI | HLA-A24:02 | RLN1 | Prostate | 6671 |
| MPRLFLFHLLEF | HLA-A24:02 | RLN1 | Prostate | 6672 |
| REFLGALSKL | HLA-A24:02 | RLN1 | Prostate | 6673 |
| KLYHPSSTKI | HLA-A24:02 | RLN1 | Prostate | 6674 |
| KWKDDVIKL | HLA-A24:02 | RLN1 | Prostate | 6675 |
| PVAEIVPSF | HLA-A24:02 | RLN1 | Prostate | 6676 |
| EFCLLLNQF | HLA-A24:02 | RLN1 | Prostate | 6677 |
| ALKDSNLSP | HLA-A24:02 | RLN1 | Prostate | 6678 |
| IMLEFIANL | HLA-A24:02 | RLN1 | Prostate | 6679 |
| EFLGALSKL | HLA-A24:02 | RLN1 | Prostate | 6680 |
| KRRPYVALF | HLA-A24:02 | RLN1 | Prostate | 6681 |
| HSQKKRRPYV | HLA-A30:01 | RLN1 | Prostate | 6682 |
| SQKKRRPYV | HLA-A30:01 | RLN1 | Prostate | 6683 |
| KLYHPSSTK | HLA-A30:01 | RLN1 | Prostate | 6684 |
| LSKLYHPSS | HLA-A30:01 | RLN1 | Prostate | 6685 |
| FSRAVAAKWK | HLA-A30:01 | RLN1 | Prostate | 6686 |
| KALRTGSCFT | HLA-A30:01 | RLN1 | Prostate | 6687 |
| SQKKRRPYVA | HLA-A30:01 | RLN1 | Prostate | 6688 |
| LSKLYHPSSTK | HLA-A30:01 | RLN1 | Prostate | 6689 |
| RAQIAICGM | HLA-A30:01 | RLN1 | Prostate | 6690 |
| KWKDDVIKL | HLA-A30:01 | RLN1 | Prostate | 6691 |
| KCCLIGCTK | HLA-A30:01 | RLN1 | Prostate | 6692 |
| AEIVPSFINK | HLA-A30:01 | RLN1 | Prostate | 6693 |
| REFLGALSK | HLA-A30:01 | RLN1 | Prostate | 6694 |
| LSFEEFKKL | HLA-A30:01 | RLN1 | Prostate | 6695 |
| EIVPSFINK | HLA-A30:01 | RLN1 | Prostate | 6696 |
| HSQKKRRPY | HLA-A30:01 | RLN1 | Prostate | 6697 |
| ELKAALSER | HLA-A33:03 | RLN1 | Prostate | 6698 |
| EFKKLIRNR | HLA-A33:03 | RLN1 | Prostate | 6699 |
| CGMSTWSKR | HLA-A33:03 | RLN1 | Prostate | 6700 |
| EEFKKLIRNR | HLA-A33:03 | RLN1 | Prostate | 6701 |
| CLLLNQFSR | HLA-A33:03 | RLN1 | Prostate | 6702 |
| EFCLLLNQFSR | HLA-A33:03 | RLN1 | Prostate | 6703 |
| ALRTGSCFTR | HLA-A33:03 | RLN1 | Prostate | 6704 |
| PELKAALSER | HLA-A33:03 | RLN1 | Prostate | 6705 |
| FCLLLNQFSR | HLA-A33:03 | RLN1 | Prostate | 6706 |
| EIVPSFINK | HLA-A33:03 | RLN1 | Prostate | 6707 |
| DVIKLCGR | HLA-A33:03 | RLN1 | Prostate | 6708 |
| DTHSQKKRR | HLA-A33:03 | RLN1 | Prostate | 6709 |
| DTHSQKKR | HLA-A33:03 | RLN1 | Prostate | 6710 |
| DDVIKLCGR | HLA-A33:03 | RLN1 | Prostate | 6711 |
| TPRPVAGDF | HLA-B07:02 | RLN1 | Prostate | 6712 |
| APQTPRPVA | HLA-B07:02 | RLN1 | Prostate | 6713 |
| MPRLFLFHLL | HLA-B07:02 | RLN1 | Prostate | 6714 |
| VPALKDSNL | HLA-B07:02 | RLN1 | Prostate | 6715 |
| RPVAEIVPSF | HLA-B07:02 | RLN1 | Prostate | 6716 |
| MPRLFLFHL | HLA-B07:02 | RLN1 | Prostate | 6717 |
| LPPELKAAL | HLA-B07:02 | RLN1 | Prostate | 6718 |
| MPRLFLFHLLEF | HLA-B07:02 | RLN1 | Prostate | 6719 |
| TPRPVAEIV | HLA-B07:02 | RLN1 | Prostate | 6720 |
| HPSSTKIQKL | HLA-B07:02 | RLN1 | Prostate | 6721 |
| SPDGGKAL | HLA-B07:02 | RLN1 | Prostate | 6722 |
| MPRLFLFHLL | HLA-B08:01 | RLN1 | Prostate | 6723 |
| MPRLFLFHL | HLA-B08:01 | RLN1 | Prostate | 6724 |
| QKKRRPYVAL | HLA-B08:01 | RLN1 | Prostate | 6725 |
| SQKKRRPYVAL | HLA-B08:01 | RLN1 | Prostate | 6726 |
| SQKKRRPYV | HLA-B08:01 | RLN1 | Prostate | 6727 |
| HSQKKRRPYVAL | HLA-B08:01 | RLN1 | Prostate | 6728 |
| ELQQYVPAL | HLA-B08:01 | RLN1 | Prostate | 6729 |
| MPRLFLFHLLEF | HLA-B08:01 | RLN1 | Prostate | 6730 |
| LIRNRQSEA | HLA-B08:01 | RLN1 | Prostate | 6731 |
| DFIQTVSL | HLA-B08:01 | RLN1 | Prostate | 6732 |
| IGCTKRSL | HLA-B08:01 | RLN1 | Prostate | 6733 |
| VIKLCGREL | HLA-B08:01 | RLN1 | Prostate | 6734 |
| ALFEKCCL | HLA-B08:01 | RLN1 | Prostate | 6735 |
| STWSKRSL | HLA-B08:01 | RLN1 | Prostate | 6736 |
| HLLEFCLL | HLA-B08:01 | RLN1 | Prostate | 6737 |
| PPELKAAL | HLA-B08:01 | RLN1 | Prostate | 6738 |
| ALSERQPSL | HLA-B08:01 | RLN1 | Prostate | 6739 |
| LPPELKAAL | HLA-B08:01 | RLN1 | Prostate | 6740 |
| REFLGALSKL | HLA-B13:02 | RLN1 | Prostate | 6741 |
| RELVRAQIAI | HLA-B13:02 | RLN1 | Prostate | 6742 |
| LEFCLLLNQF | HLA-B13:02 | RLN1 | Prostate | 6743 |
| LEFIANLPP | HLA-B13:02 | RLN1 | Prostate | 6744 |
| GDFIQTVSL | HLA-B13:02 | RLN1 | Prostate | 6745 |
| LEFIANLPPEL | HLA-B13:02 | RLN1 | Prostate | 6746 |
| GDFIQTVSLGI | HLA-B13:02 | RLN1 | Prostate | 6747 |
| MLEFIANLPP | HLA-B13:02 | RLN1 | Prostate | 6748 |
| TETIIMLEFI | HLA-B13:02 | RLN1 | Prostate | 6749 |
| VAGDFIQTV | HLA-B13:02 | RLN1 | Prostate | 6750 |
| ALFEKCCLI | HLA-B13:02 | RLN1 | Prostate | 6751 |
| SLPELQQYV | HLA-B13:02 | RLN1 | Prostate | 6752 |
| QQYVPALKD | HLA-B13:02 | RLN1 | Prostate | 6753 |
| HLLEFCLLL | HLA-B13:02 | RLN1 | Prostate | 6754 |
| RQPSLPELQ | HLA-B13:02 | RLN1 | Prostate | 6755 |
| RLFLFHLLE | HLA-B13:02 | RLN1 | Prostate | 6756 |
| AGDFIQTV | HLA-B13:02 | RLN1 | Prostate | 6757 |
| RLFLFHLL | HLA-B13:02 | RLN1 | Prostate | 6758 |
| FTREFLGAL | HLA-B46:01 | RLN1 | Prostate | 6759 |
| FIANLPPEL | HLA-B46:01 | RLN1 | Prostate | 6760 |
| IAICGMSTW | HLA-B46:01 | RLN1 | Prostate | 6761 |
| FINKDTETI | HLA-B46:01 | RLN1 | Prostate | 6762 |
| FSRAVAAKW | HLA-B46:01 | RLN1 | Prostate | 6763 |
| FLGALSKLY | HLA-B46:01 | RLN1 | Prostate | 6764 |
| ALKDSNLSF | HLA-B46:01 | RLN1 | Prostate | 6765 |
| KALRTGSCF | HLA-B46:01 | RLN1 | Prostate | 6766 |
| CTKRSLAKY | HLA-B46:01 | RLN1 | Prostate | 6767 |
| ISPDGGKAL | HLA-B46:01 | RLN1 | Prostate | 6768 |
| VAGDFIQTV | HLA-B46:01 | RLN1 | Prostate | 6769 |
| VIKLCGREL | HLA-B46:01 | RLN1 | Prostate | 6770 |
| PVAEIVPSF | HLA-B46:01 | RLN1 | Prostate | 6771 |
| SLPELQQY | HLA-B46:01 | RLN1 | Prostate | 6772 |
| TIIIMLEF | HLA-B46:01 | RLN1 | Prostate | 6773 |
| FLFHLLEF | HLA-B46:01 | RLN1 | Prostate | 6774 |
| FIANLPPEL | HLA-C01:02 | RLN1 | Prostate | 6775 |
| ISPDGGKAL | HLA-C01:02 | RLN1 | Prostate | 6776 |
| FTREFLGAL | HLA-C01:02 | RLN1 | Prostate | 6777 |
| IMLEFIANL | HLA-C01:02 | RLN1 | Prostate | 6778 |
| MSTWSKRSL | HLA-C01:02 | RLN1 | Prostate | 6779 |
| SLPELQQYV | HLA-C01:02 | RLN1 | Prostate | 6780 |
| AADSNPSEL | HLA-C01:02 | RLN1 | Prostate | 6781 |
| ALSERQPSL | HLA-C01:02 | RLN1 | Prostate | 6782 |
| FIQTVSLGI | HLA-C01:02 | RLN1 | Prostate | 6783 |
| NLPPELKAAL | HLA-C01:02 | RLN1 | Prostate | 6784 |
| LPPELKAAL | HLA-C01:02 | RLN1 | Prostate | 6785 |
| SNPSELKYL | HLA-C01:02 | RLN1 | Prostate | 6786 |
| RQPSLPEL | HLA-C01:02 | RLN1 | Prostate | 6787 |
| DAPQTPRPV | HLA-C01:02 | RLN1 | Prostate | 6788 |
| FIANLPPEL | HLA-C03:04 | RLN1 | Prostate | 6789 |
| FTREFLGAL | HLA-C03:04 | RLN1 | Prostate | 6790 |
| MSTWSKRSL | HLA-C03:04 | RLN1 | Prostate | 6791 |
| AADSNPSEL | HLA-C03:04 | RLN1 | Prostate | 6792 |
| FINKDTETI | HLA-C03:04 | RLN1 | Prostate | 6793 |
| LAICGMSTW | HLA-C03:04 | RLN1 | Prostate | 6794 |
| RAQIAICQM | HLA-C03:04 | RLN1 | Prostate | 6795 |
| ISPDGGKAL | HLA-C03:04 | RLN1 | Prostate | 6796 |
| LSFEEFKKL | HLA-C03:04 | RLN1 | Prostate | 6797 |
| IANLPPEL | HLA-C03:04 | RLN1 | Prostate | 6798 |
| EAADSNPSEL | HLA-C03:04 | RLN1 | Prostate | 6799 |
| FIANLPPEL | HLA-C04:01 | RLN1 | Prostate | 6800 |
| AADSNPSEL | HLA-C04:01 | RLN1 | Prostate | 6801 |
| SLPELQQYV | HLA-C04:01 | RLN1 | Prostate | 6802 |
| LYHPSSTKI | HLA-C04:01 | RLN1 | Prostate | 6803 |
| FIQTVSLGI | HLA-C04:01 | RLN1 | Prostate | 6804 |
| KRRPYVALF | HLA-C04:01 | RLN1 | Prostate | 6805 |
| SFEEFKKLI | HLA-C04:01 | RLN1 | Prostate | 6806 |
| FHLLEFCLLL | HLA-C04:01 | RLN1 | Prostate | 6807 |
| FHLLEFCLL | HLA-C04:01 | RLN1 | Prostate | 6808 |
| SFEEFKKL | HLA-C04:01 | RLN1 | Prostate | 6809 |
| WKDDVIKL | HLA-C04:01 | RLN1 | Prostate | 6810 |
| LANLPPEL | HLA-C04:01 | RLN1 | Prostate | 6811 |
| LFHLLEFCL | HLA-C04:01 | RLN1 | Prostate | 6812 |
| LFLFHLLEF | HLA-C04:01 | RLN1 | Prostate | 6813 |
| EFCLLLNQF | HLA-C04:01 | RLN1 | Prostate | 6814 |
| DFIQTVSL | HLA-C04:01 | RLN1 | Prostate | 6815 |
| KRRPYVALF | HLA-C07:01 | RLN1 | Prostate | 6816 |
| ERQPSLPEL | HLA-C07:01 | RLN1 | Prostate | 6817 |
| LYHPSSTKI | HLA-C07:01 | RLN1 | Prostate | 6818 |
| KKRRPYVALF | HLA-C07:01 | RLN1 | Prostate | 6819 |
| VRAQIAICGM | HLA-C07:01 | RLN1 | Prostate | 6820 |
| FTREFLGAL | HLA-C07:01 | RLN1 | Prostate | 6821 |
| RRPYVALF | HLA-C07:01 | RLN1 | Prostate | 6822 |
| FIANLPPEL | HLA-C07:01 | RLN1 | Prostate | 6823 |
| MPRLFLFHLL | HLA-C07:01 | RLN1 | Prostate | 6824 |
| KRRPYVAL | HLA-C07:01 | RLN1 | Prostate | 6825 |
| GDFIQTVSL | HLA-C07:01 | RLN1 | Prostate | 6826 |
| TPRPVAGD | HLA-C07:01 | RLN1 | Prostate | 6827 |
| STWSKRSL | HLA-C07:01 | RLN1 | Prostate | 6828 |
| RRPYVALFE | HLA-C07:01 | RLN1 | Prostate | 6829 |
| KRSLSQED | HLA-C07:01 | RLN1 | Prostate | 6830 |
| LIGCTKRSL | HLA-C07:01 | RLN1 | Prostate | 6831 |
| KRRPYVALF | HLA-C07:02 | RLN1 | Prostate | 6832 |
| LYHPSSTKI | HLA-C07:02 | RLN1 | Prostate | 6833 |
| KKRRPYVALF | HLA-C07:02 | RLN1 | Prostate | 6834 |
| ERQPSLPEL | HLA-C07:02 | RLN1 | Prostate | 6835 |
| RRPYVALF | HLA-C07:02 | RLN1 | Prostate | 6836 |
| FHLLEFCLL | HLA-C07:02 | RLN1 | Prostate | 6837 |
| FTREFLGAL | HLA-C07:02 | RLN1 | Prostate | 6838 |
| FIANLPPEL | HLA-C07:02 | RLN1 | Prostate | 6839 |
| SQKKRRPYVALF | HLA-C07:02 | RLN1 | Prostate | 6840 |
| KRRPYVAL | HLA-C07:02 | RLN1 | Prostate | 6841 |
| ISPDGGKAL | HLA-C07:02 | RLN1 | Prostate | 6842 |
| KWKDDVIKL | HLA-C07:02 | RLN1 | Prostate | 6843 |
| KKRRPYVAL | HLA-C07:02 | RLN1 | Prostate | 6844 |
| IANLPPEL | HLA-C07:02 | RLN1 | Prostate | 6845 |
| FSEGAQHGPY | HLA-A01:01 | RSPH6A | Thyroid | 6846 |
| FTGYLDTPVVSY | HLA-A01:01 | RSPH6A | Thyroid | 6847 |
| FPSEFQPQPY | HLA-A01:01 | RSPH6A | Thyroid | 6848 |
| YLDTPVVSY | HLA-A01:01 | RSPH6A | Thyroid | 6849 |
| PSELGFPHY | HLA-A01:01 | RSPH6A | Thyroid | 6850 |
| YSDESRMQV | HLA-A01:01 | RSPH6A | Thyroid | 6851 |
| SLYEHLVNL | HLA-A02:01 | RSPH6A | Thyroid | 6852 |
| LLMPQVFQA | HLA-A02:01 | RSPH6A | Thyroid | 6853 |
| SLYEHLVNLL | HLA-A02:01 | RSPH6A | Thyroid | 6854 |
| GLPWTRLPHV | HLA-A02:01 | RSPH6A | Thyroid | 6855 |
| LSLYEHLVNL | HLA-A02:01 | RSPH6A | Thyroid | 6856 |
| HLAPWTTRL | HLA-A02:01 | RSPH6A | Thyroid | 6857 |
| TQWEWFHPKL | HLA-A02:01 | RSPH6A | Thyroid | 6858 |
| SMANWVHHT | HLA-A02:01 | RSPH6A | Thyroid | 6859 |
| NLWPGAYAYA | HLA-A02:01 | RSPH6A | Thyroid | 6860 |
| NLLMPQVFQA | HLA-A02:01 | RSPH6A | Thyroid | 6861 |
| SLCPQYSVAV | HLA-A02:01 | RSPH6A | Thyroid | 6862 |
| KADEGPEEV | HLA-A02:01 | RSPH6A | Thyroid | 6863 |
| YLDTPVVSY | HLA-A02:01 | RSPH6A | Thyroid | 6864 |
| ALQFLPSEL | HLA-A02:01 | RSPH6A | Thyroid | 6865 |
| RLGGMEYPSV | HLA-A02:01 | RSPH6A | Thyroid | 6866 |
| SLSQQENLL | HLA-A02:01 | RSPH6A | Thyroid | 6867 |
| GAYAYASGK | HLA-A03:01 | RSPH6A | Thyroid | 6868 |
| RCTWVNPLQK | HLA-A03:01 | RSPH6A | Thyroid | 6869 |
| SLYEHLVNLLTK | HLA-A03:01 | RSPH6A | Thyroid | 6870 |
| GAYAYASGKK | HLA-A03:01 | RSPH6A | Thyroid | 6871 |
| CTWVNPLQK | HLA-A03:01 | RSPH6A | Thyroid | 6872 |
| SVWKPPPVIPK | HLA-A03:01 | RSPH6A | Thyroid | 6873 |
| STRPCQPPFNK | HLA-A03:01 | RSPH6A | Thyroid | 6874 |
| VWKPPPVIPK | HLA-A03:01 | RSPH6A | Thyroid | 6875 |
| TTQWEWFHPK | HLA-A11:01 | RSPH6A | Thyroid | 6876 |
| TQWEWFHPK | HLA-A11:01 | RSPH6A | Thyroid | 6877 |
| GAYAYASGK | HLA-A11:01 | RSPH6A | Thyroid | 6878 |
| CTWVNPLQK | HLA-A11:01 | RSPH6A | Thyroid | 6879 |
| SVWKPPPVIPK | HLA-A11:01 | RSPH6A | Thyroid | 6880 |
| STRPCQPPENK | HLA-A11:01 | RSPH6A | Thyroid | 6881 |
| RTTQWEWFHPK | HLA-A11:01 | RSPH6A | Thyroid | 6882 |
| SYLVAEVEF | HLA-A24:02 | RSPH6A | Thyroid | 6883 |
| RSYLVAEVEF | HLA-A24:02 | RSPH6A | Thyroid | 6884 |
| MEYPSVNTGF | HLA-A24:02 | RSPH6A | Thyroid | 6885 |
| LFQQLDPTF | HLA-A24:02 | RSPH6A | Thyroid | 6886 |
| EYPSVNTGF | HLA-A24:02 | RSPH6A | Thyroid | 6887 |
| IYIGWGHKY | HLA-A24:02 | RSPH6A | Thyroid | 6888 |
| PYIRDDPALQF | HLA-A24:02 | RSPH6A | Thyroid | 6889 |
| KIKKFFTGYL | HLA-A30:01 | RSPH6A | Thyroid | 6890 |
| SFRIFLAMK | HLA-A30:01 | RSPH6A | Thyroid | 6891 |
| STRPCQPPF | HLA-A30:01 | RSPH6A | Thyroid | 6892 |
| GAYAYASGK | HLA-A30:01 | RSPH6A | Thyroid | 6893 |
| KIKKFFTGY | HLA-A30:01 | RSPH6A | Thyroid | 6894 |
| CTWVNPLQK | HLA-A30:01 | RSPH6A | Thyroid | 6895 |
| KFENIYIGW | HLA-A30:01 | RSPH6A | Thyroid | 6896 |
| YAYASGNLR | HLA-A33:03 | RSPH6A | Thyroid | 6897 |
| STAPRASTR | HLA-A33:03 | RSPH6A | Thyroid | 6898 |
| WFHPKLDTLR | HLA-A33:03 | RSPH6A | Thyroid | 6899 |
| HTQHILPQGR | HLA-A33:03 | RSPH6A | Thyroid | 6900 |
| QASQRRHSR | HLA-A33:03 | RSPH6A | Thyroid | 6901 |
| EQQPIHTCR | HLA-A33:03 | RSPH6A | Thyroid | 6902 |
| EKQKALFTR | HLA-A33:03 | RSPH6A | Thyroid | 6903 |
| MHLAPWTTR | HLA-A33:03 | RSPH6A | Thyroid | 6904 |
| APGWSQRGSL | HLA-B07:02 | RSPH6A | Thyroid | 6905 |
| APRASTRPC | HLA-B07:02 | RSPH6A | Thyroid | 6906 |
| RPEDPLSVL | HLA-B07:02 | RSPH6A | Thyroid | 6907 |
| APWTTRLSCSL | HLA-B07:02 | RSPH6A | Thyroid | 6908 |
| SPESFNPAL | HLA-B07:02 | RSPH6A | Thyroid | 6909 |
| YPSGPEIMEM | HLA-B07:02 | RSPH6A | Thyroid | 6910 |
| ILGIKRSYL | HLA-B08:01 | RSPH6A | Thyroid | 6911 |
| YLRAQIARISAA | HLA-B08:01 | RSPH6A | Thyroid | 6912 |
| YKMAEKQKAL | HLA-B08:01 | RSPH6A | Thyroid | 6913 |
| WCKILGIKRSYL | HLA-B08:01 | RSPH6A | Thyroid | 6914 |
| KMAEKQKAL | HLA-B08:01 | RSPH6A | Thyroid | 6915 |
| EGIPVLEL | HLA-B08:01 | RSPH6A | Thyroid | 6916 |
| DPLSVLESL | HLA-B08:01 | RSPH6A | Thyroid | 6917 |
| WFHPKLDTL | HLA-B08:01 | RSPH6A | Thyroid | 6918 |
| DIVPKSVW | HLA-B08:01 | RSPH6A | Thyroid | 6919 |
| CDLSLYEHLV | HLA-B13:02 | RSPH6A | Thyroid | 6920 |
| FEGIPVLELV | HLA-B13:02 | RSPH6A | Thyroid | 6921 |
| TQWEWFHPKL | HLA-B13:02 | RSPH6A | Thyroid | 6922 |
| CSLCPQYSV | HLA-B13:02 | RSPH6A | Thyroid | 6923 |
| AQIVNARKI | HLA-B13:02 | RSPH6A | Thyroid | 6924 |
| HLVNLLTKI | HLA-B13:02 | RSPH6A | Thyroid | 6925 |
| GQFNLYQTD | HLA-B13:02 | RSPH6A | Thyroid | 6926 |
| GQSSLFQQL | HLA-B13:02 | RSPH6A | Thyroid | 6927 |
| YAYASGKKF | HLA-B46:01 | RSPH6A | Thyroid | 6928 |
| LAVQNAKAY | HLA-B46:01 | RSPH6A | Thyroid | 6929 |
| SAATQVSPL | HLA-B46:01 | RSPH6A | Thyroid | 6930 |
| RSNLWPGAY | HLA-B46:01 | RSPH6A | Thyroid | 6931 |
| HSRDQAQAL | HLA-B46:01 | RSPH6A | Thyroid | 6932 |
| YLDTPVVSY | HLA-B46:01 | RSPH6A | Thyroid | 6933 |
| EARLGGMEY | HLA-B46:01 | RSPH6A | Thyroid | 6934 |
| NLWPGAYAY | HLA-B46:01 | RSPH6A | Thyroid | 6935 |
| SLYEHLVNL | HLA-C01:02 | RSPH6A | Thyroid | 6936 |
| YSPESENPAL | HLA-C01:02 | RSPH6A | Thyroid | 6937 |
| VGPPLLTPL | HLA-C01:02 | RSPH6A | Thyroid | 6938 |
| HLAPWITRL | HLA-C01:02 | RSPH6A | Thyroid | 6939 |
| ILPQGRCTW | HLA-C01:02 | RSPH6A | Thyroid | 6940 |
| NAPGWSQRGSL | HLA-C01:02 | RSPH6A | Thyroid | 6941 |
| YAYASGKKF | HLA-C03:04 | RSPH6A | Thyroid | 6942 |
| SAATQVSPL | HLA-C03:04 | RSPH6A | Thyroid | 6943 |
| FQEPPVNPL | HLA-C03:04 | RSPH6A | Thyroid | 6944 |
| TSINCDLSL | HLA-C03:04 | RSPH6A | Thyroid | 6945 |
| QVAELTTSL | HLA-C03:04 | RSPH6A | Thyroid | 6946 |
| YAYASGNL | HLA-C03:04 | RSPH6A | Thyroid | 6947 |
| FEGIPVLEL | HLA-C03:04 | RSPH6A | Thyroid | 6948 |
| IRDDPALQF | HLA-C04:01 | RSPH6A | Thyroid | 6949 |
| FQEPPVNPL | HLA-C04:01 | RSPH6A | Thyroid | 6950 |
| YSDESRMQV | HLA-C04:01 | RSPH6A | Thyroid | 6951 |
| LYEHLVNLL | HLA-C04:01 | RSPH6A | Thyroid | 6952 |
| SYLVAEVEF | HLA-C04:01 | RSPH6A | Thyroid | 6953 |
| LYEHLVNL | HLA-C04:01 | RSPH6A | Thyroid | 6954 |
| YLDTPVVSY | HLA-C04:01 | RSPH6A | Thyroid | 6955 |
| SRSGANKYL | HLA-C07:01 | RSPH6A | Thyroid | 6956 |
| FRIFLAMKQL | HLA-C07:01 | RSPH6A | Thyroid | 6957 |
| CRFWGKILGI | HLA-C07:01 | RSPH6A | Thyroid | 6958 |
| KRSYLVAEV | HLA-C07:01 | RSPH6A | Thyroid | 6959 |
| SRMQVAEL | HLA-C07:01 | RSPH6A | Thyroid | 6960 |
| PDFEGIPVL | HLA-C07:01 | RSPH6A | Thyroid | 6961 |
| PSGPEIMEM | HLA-C07:01 | RSPH6A | Thyroid | 6962 |
| QHGPYIRDD | HLA-C07:01 | RSPH6A | Thyroid | 6963 |
| WFHPKLDTL | HLA-C07:02 | RSPH6A | Thyroid | 6964 |
| IYIGWGHKY | HLA-C07:02 | RSPH6A | Thyroid | 6965 |
| YAYASGKKF | HLA-C07:02 | RSPH6A | Thyroid | 6966 |
| IRDDPALQP | HLA-C07:02 | RSPH6A | Thyroid | 6967 |
| VRSNLWPGAY | HLA-C07:02 | RSPH6A | Thyroid | 6968 |
| QRPEDPLSVL | HLA-C07:02 | RSPH6A | Thyroid | 6969 |
| ETLRLASSY | HLA-A01:01 | SCXB | Thyroid | 6970 |
| IETLRLASSY | HLA-A01:01 | SCXB | Thyroid | 6971 |
| RTNSVNTAF | HLA-A01:01 | SCXB | Thyroid | 6972 |
| PTEPADRKL | HLA-A01:01 | SCXB | Thyroid | 6973 |
| GSDSSGSDEK | HLA-A01:01 | SCXB | Thyroid | 6974 |
| YLYPEVSPL | HLA-A02:01 | SCXB | Thyroid | 6975 |
| RYLYPEVSPL | HLA-A02:01 | SCXB | Thyroid | 6976 |
| YLYPEVSPLS | HLA-A02:01 | SCXB | Thyroid | 6977 |
| RLASSYISHL | HLA-A02:01 | SCXB | Thyroid | 6978 |
| YISHLGNVLL | HLA-A02:01 | SCXB | Thyroid | 6979 |
| GRYLYPEVSPL | HLA-A02:01 | SCXB | Thyroid | 6980 |
| PGRYLYPEVSPL | HLA-A02:01 | SCXB | Thyroid | 6981 |
| MSFATLRPA | HLA-A02:01 | SCXB | Thyroid | 6982 |
| YLYPEVSPLSE | HLA-A02:01 | SCXB | Thyroid | 6983 |
| GSDEKPCRV | HLA-A02:01 | SCXB | Thyroid | 6984 |
| TLIPTEPAD | HLA-A02:01 | SCXB | Thyroid | 6985 |
| GLQGARRRA | HLA-A02:01 | SCXB | Thyroid | 6986 |
| YLYPEVSP | HLA-A02:01 | SCXB | Thyroid | 6987 |
| CLSNQRKLSK | HLA-A03:01 | SCXB | Thyroid | 6988 |
| RLASSYISH | HLA-A03:01 | SCXB | Thyroid | 6989 |
| LSNQRKLSK | HLA-A03:01 | SCXB | Thyroid | 6990 |
| YLYPEVSPL | HLA-A03:01 | SCXB | Thyroid | 6991 |
| TLRPAPPGRY | HLA-A03:01 | SCXB | Thyroid | 6992 |
| ATLRPAPPGR | HLA-A11:01 | SCXB | Thyroid | 6993 |
| RTLIPTEPADRK | HLA-A11:01 | SCXB | Thyroid | 6994 |
| LSNQRKLSK | HLA-A11:01 | SCXB | Thyroid | 6995 |
| CLSNQRKLSK | HLA-A11:01 | SCXB | Thyroid | 6996 |
| RLASSYISH | HLA-A11:01 | SCXB | Thyroid | 6997 |
| SDSSGSDEK | HLA-A11:01 | SCXB | Thyroid | 6998 |
| SYISHLGNV | HLA-A24:02 | SCXB | Thyroid | 6999 |
| SYISHLGNVL | HLA-A24:02 | SCXB | Thyroid | 7000 |
| RYLYPEVSPL | HLA-A24:02 | SCXB | Thyroid | 7001 |
| SYISHLGNVLL | HLA-A24:02 | SCXB | Thyroid | 7002 |
| LYPEVSPLS | HLA-A24:02 | SCXB | Thyroid | 7003 |
| RVHAARCGL | HLA-A30:01 | SCXB | Thyroid | 7004 |
| MSFATLRPA | HLA-A30:01 | SCXB | Thyroid | 7005 |
| RTLIPTEPA | HLA-A30:01 | SCXB | Thyroid | 7006 |
| KIETLRLASSYI | HLA-A30:01 | SCXB | Thyroid | 7007 |
| RPAPPGRYL | HLA-A30:01 | SCXB | Thyroid | 7008 |
| SYISHLGNV | HLA-A30:01 | SCXB | Thyroid | 7009 |
| HSGPAFFHAAR | HLA-A33:03 | SCXB | Thyroid | 7010 |
| SGPAFFHAAR | HLA-A33:03 | SCXB | Thyroid | 7011 |
| TLRPAPPGR | HLA-A33:03 | SCXB | Thyroid | 7012 |
| HTANARER | HLA-A33:03 | SCXB | Thyroid | 7013 |
| TANARERDR | HLA-A33:03 | SCXB | Thyroid | 7014 |
| ETLRLASSY | HLA-A33:03 | SCXB | Thyroid | 7015 |
| RPAPPGRYL | HLA-B07:02 | SCXB | Thyroid | 7016 |
| LRPAPPGRYL | HLA-B07:02 | SCXB | Thyroid | 7017 |
| IRPAPPGRYLY | HLA-B07:02 | SCXB | Thyroid | 7018 |
| QPCHSGPAF | HLA-B07:02 | SCXB | Thyroid | 7019 |
| EPRQRHTANA | HLA-B08:01 | SCXB | Thyroid | 7020 |
| YLYPEVSPL | HLA-B08:01 | SCXB | Thyroid | 7021 |
| EPRQRHTA | HLA-B08:01 | SCXB | Thyroid | 7022 |
| EPRQRHTAN | HLA-B08:01 | SCXB | Thyroid | 7023 |
| EPADRKLSK | HLA-B08:01 | SCXB | Thyroid | 7024 |
| QPKQICTF | HLA-B08:01 | SCXB | Thyroid | 7025 |
| MSFATLRPA | HLA-B13:02 | SCXB | Thyroid | 7026 |
| SSYISHLGNV | HLA-B13:02 | SCXB | Thyroid | 7027 |
| HSGPAFFHA | HLA-B13:02 | SCXB | Thyroid | 7028 |
| YLYPEVSPL | HLA-B13:02 | SCXB | Thyroid | 7029 |
| HLGNVLLA | HLA-B13:02 | SCXB | Thyroid | 7030 |
| RERDRTNSV | HLA-B13:02 | SCXB | Thyroid | 7031 |
| YLYPEVSPL | HLA-B46:01 | SCXB | Thyroid | 7032 |
| YISHLGNVL | HLA-B46:01 | SCXB | Thyroid | 7033 |
| RTNSVNTAF | HLA-B46:01 | SCXB | Thyroid | 7034 |
| RLASSYISH | HLA-B46:01 | SCXB | Thyroid | 7035 |
| YLYPEVSP | HLA-B46:01 | SCXB | Thyroid | 7036 |
| YLYPEVSPL | HLA-C01:02 | SCXB | Thyroid | 7037 |
| YISHLGNVL | HLA-C01:02 | SCXB | Thyroid | 7038 |
| ISHLGNVLL | HLA-C01:02 | SCXB | Thyroid | 7039 |
| LYPEVSPL | HLA-C01:02 | SCXB | Thyroid | 7040 |
| PAPPGRYL | HLA-C01:02 | SCXB | Thyroid | 7041 |
| YLYPEVSPL | HLA-C03:04 | SCXB | Thyroid | 7042 |
| LASSYISHL | HLA-C03:04 | SCXB | Thyroid | 7043 |
| YISHLGNVL | HLA-C03:04 | SCXB | Thyroid | 7044 |
| RPAPPGRYL | HLA-C04:01 | SCXB | Thyroid | 7045 |
| RTNSVNTAF | HLA-C04:01 | SCXB | Thyroid | 7046 |
| YLYPEVSPL | HLA-C04:01 | SCXB | Thyroid | 7047 |
| LYPEVSPL | HLA-C04:01 | SCXB | Thyroid | 7048 |
| ISHLGNVLL | HLA-C04:01 | SCXB | Thyroid | 7049 |
| LRPAPPGRYL | HLA-C07:01 | SCXB | Thyroid | 7050 |
| CRVHAARCGL | HLA-C07:01 | SCXB | Thyroid | 7051 |
| SYISHLGNV | HLA-C07:01 | SCXB | Thyroid | 7052 |
| LRPAPPGRY | HLA-C07:01 | SCXB | Thyroid | 7053 |
| RPAPPGRYL | HLA-C07:01 | SCXB | Thyroid | 7054 |
| YLYPEVSPL | HLA-C07:01 | SCXB | Thyroid | 7055 |
| RYLYPEVSP | HLA-C07:01 | SCXB | Thyroid | 7056 |
| SYISHLGNV | HLA-C07:02 | SCXB | Thyroid | 7057 |
| YLYPEVSPL | HLA-C07:02 | SCXB | Thyroid | 7058 |
| LRPAPPGRYL | HLA-C07:02 | SCXB | Thyroid | 7059 |
| LYPEVSPL | HLA-C07:02 | SCXB | Thyroid | 7060 |
| LRPAPPGRY | HLA-C07:02 | SCXB | Thyroid | 7061 |
| FTFNLANALY | HLA-A01:01 | SERPINI2 | Pancreas | 7062 |
| NTEFAVDLY | HLA-A01:01 | SERPINI2 | Pancreas | 7063 |
| KVDFKDVLY | HLA-A01:01 | SERPINI2 | Pancreas | 7064 |
| FSESSLNY | HLA-A01:01 | SERPINI2 | Pancreas | 7065 |
| FVLKSFFSA | HLA-A02:01 | SERPINI2 | Pancreas | 7066 |
| YLQEGFTV | HLA-A02:01 | SERPINI2 | Pancreas | 7067 |
| FIANHPFLFI | HLA-A02:01 | SERPINI2 | Pancreas | 7068 |
| FLWSLLLL | HLA-A02:01 | SERPINI2 | Pancreas | 7069 |
| ALYLQEGFTV | HLA-A02:01 | SERPINI2 | Pancreas | 7070 |
| FVLKSFFSAI | HLA-A02:01 | SERPINI2 | Pancreas | 7071 |
| VLYSLNITEI | HLA-A02:01 | SERPINI2 | Pancreas | 7072 |
| WLSEMQEEEV | HLA-A02:01 | SERPINI2 | Pancreas | 7073 |
| SLNYQVLEL | HLA-A02:01 | SERPINI2 | Pancreas | 7074 |
| FLWSLLLLF | HLA-A02:01 | SERPINI2 | Pancreas | 7075 |
| TLVLEMVQL | HLA-A02:01 | SERPINI2 | Pancreas | 7076 |
| YLQEGPTVK | HLA-A02:01 | SERPINI2 | Pancreas | 7077 |
| KSFFSAISEK | HLA-A03:01 | SERPINI2 | Pancreas | 7078 |
| KLITAQQILK | HLA-A03:01 | SERPINI2 | Pancreas | 7079 |
| AIYFKGDWK | HLA-A03:01 | SERPINI2 | Pancreas | 7080 |
| ALYLQEGFTVK | HLA-A03:01 | SERPINI2 | Pancreas | 7081 |
| STVKIPMMK | HLA-A11:01 | SERPINI2 | Pancreas | 7082 |
| KSFFSAISEK | HLA-A11:01 | SERPINI2 | Pancreas | 7083 |
| AIYFKGDWK | HLA-A11:01 | SERPINI2 | Pancreas | 7084 |
| TSAGEEFFVLK | HLA-A11:01 | SERPINI2 | Pancreas | 7085 |
| AGEEFFVLK | HLA-A11:01 | SERPINI2 | Pancreas | 7086 |
| QFIANHPFLF | HLA-A24:02 | SERPINI2 | Pancreas | 7087 |
| LYSLNITEIF | HLA-A24:02 | SERPINI2 | Pancreas | 7088 |
| LYLQEGFTV | HLA-A24:02 | SERPINI2 | Pancreas | 7089 |
| IYFKGDWKQKF | HLA-A24:02 | SERPINI2 | Pancreas | 7090 |
| QYLHGNKEF | HLA-A24:02 | SERPINI2 | Pancreas | 7091 |
| MMKALLRTK | HLA-A30:01 | SERPINI2 | Pancreas | 7092 |
| RTKYGYFSE | HLA-A30:01 | SERPINI2 | Pancreas | 7093 |
| KSFFSAISEK | HLA-A30:01 | SERPINI2 | Pancreas | 7094 |
| YFKGDWKQK | HLA-A30:01 | SERPINI2 | Pancreas | 7095 |
| SFFSAISEK | HLA-A30:01 | SERPINI2 | Pancreas | 7096 |
| EMISTWVER | HLA-A33:03 | SERPINI2 | Pancreas | 7097 |
| LFFGSQASR | HLA-A33:03 | SERPINI2 | Pancreas | 7098 |
| LLFFGSQASR | HLA-A33:03 | SERPINI2 | Pancreas | 7099 |
| DTQEIKGR | HLA-A33:03 | SERPINI2 | Pancreas | 7100 |
| ESILFMGR | HLA-A33:03 | SERPINI2 | Pancreas | 7101 |
| SPLGITLVL | HLA-B07:02 | SERPINI2 | Pancreas | 7102 |
| IPMMKALL | HLA-B07:02 | SERPINI2 | Pancreas | 7103 |
| FSPLGITLVL | HLA-B07:02 | SERPINI2 | Pancreas | 7104 |
| GPLTRLVL | HLA-B07:02 | SERPINI2 | Pancreas | 7105 |
| LLRTKYGYF | HLA-B08:01 | SERPINI2 | Pancreas | 7106 |
| VLKSFFSAI | HLA-B08:01 | SERPINI2 | Pancreas | 7107 |
| IPMMKALL | HLA-B08:01 | SERPINI2 | Pancreas | 7108 |
| DLYQEVSL | HLA-B08:01 | SERPINI2 | Pancreas | 7109 |
| AISEKKQEF | HLA-B08:01 | SERPINI2 | Pancreas | 7110 |
| HIPVIMSL | HLA-B08:01 | SERPINI2 | Pancreas | 7111 |
| KDVLYSLNI | HLA-B13:02 | SERPINI2 | Pancreas | 7112 |
| MDTIFLWSLLL | HLA-B13:02 | SERPINI2 | Pancreas | 7113 |
| MDTIFLWSLL | HLA-B13:02 | SERPINI2 | Pancreas | 7114 |
| YVSQVTQKV | HLA-B13:02 | SERPINI2 | Pancreas | 7115 |
| AQQQIRQTL | HLA-B13:02 | SERPINI2 | Pancreas | 7116 |
| AQKNTEFAV | HLA-B13:02 | SERPINI2 | Pancreas | 7117 |
| FTFNLANAL | HLA-B46:01 | SERPINI2 | Pancreas | 7118 |
| FIANHPFLF | HLA-B46:01 | SERPINI2 | Pancreas | 7119 |
| YSLNITEIF | HLA-B46:01 | SERPINI2 | Pancreas | 7120 |
| FTFNLANALY | HLA-B46:01 | SERPINI2 | Pancreas | 7121 |
| FAVDLYQEV | HLA-B46:01 | SERPINI2 | Pancreas | 7122 |
| TSAEKKQEF | HLA-B46:01 | SERPINI2 | Pancreas | 7123 |
| VTNPDTQEI | HLA-B46:01 | SERPINI2 | Pancreas | 7124 |
| FTFNLANAL | HLA-C01:02 | SERPINI2 | Pancreas | 7125 |
| FGPLTRLVL | HLA-C01:02 | SERPINI2 | Pancreas | 7126 |
| YGYFSESSL | HLA-C01:02 | SERPINI2 | Pancreas | 7127 |
| FSPLGITLVL | HLA-C01:02 | SERPINI2 | Pancreas | 7128 |
| FSPLGITL | HLA-C01:02 | SERPINI2 | Pancreas | 7129 |
| FTFNLANAL | HLA-C03:04 | SERPINI2 | Pancreas | 7130 |
| FAVDLYQEV | HLA-C03:04 | SERPINI2 | Pancreas | 7131 |
| YGYFSESSL | HLA-C03:04 | SERPINI2 | Pancreas | 7132 |
| IHIPVIMSL | HLA-C03:04 | SERPINI2 | Pancreas | 7133 |
| FIANHPFLF | HLA-C04:01 | SERPINI2 | Pancreas | 7134 |
| YFSESSLNY | HLA-C04:01 | SERPINI2 | Pancreas | 7135 |
| IFSPLGITL | HLA-C04:01 | SERPINI2 | Pancreas | 7136 |
| ITDSSEVYV | HLA-C04:01 | SERPINI2 | Pancreas | 7137 |
| TFNLANALYL | HLA-C04:01 | SERPINI2 | Pancreas | 7138 |
| FRKEDTQLI | HLA-C07:01 | SERPINI2 | Pancreas | 7139 |
| FIANHPFLF | HLA-C07:01 | SERPINI2 | Pancreas | 7140 |
| FTFNLANAL | HLA-C07:01 | SERPINI2 | Pancreas | 7141 |
| SAGEEFFVL | HLA-C07:01 | SERPINI2 | Pancreas | 7142 |
| SLNYQVLEL | HLA-C07:01 | SERPINI2 | Pancreas | 7143 |
| LNYQVLEL | HLA-C07:01 | SERPINI2 | Pancreas | 7144 |
| FRKEDTQLI | HLA-C07:02 | SERPINI2 | Pancreas | 7145 |
| FIANHPFLF | HLA-C07:02 | SERPINIZ | Pancreas | 7146 |
| IHIPVIMSL | HLA-C07:02 | SERPINI2 | Pancreas | 7147 |
| KKQEFTFNL | HLA-C07:02 | SERPINI2 | Pancreas | 7148 |
| SYKGDEFSL | HLA-C07:02 | SERPINI2 | Pancreas | 7149 |
| FRKEDTQL | HLA-C07:02 | SERPINI2 | Pancreas | 7150 |
| FTDFMGIVY | HLA-A01:01 | SLC45A2 | Melanoma | 7151 |
| FFTDFMGQIVY | HLA-A01:01 | SLC45A2 | Melanoma | 7152 |
| LSSDGMYEY | HLA-A01:01 | SLC45A2 | Melanoma | 7153 |
| LFFTDEMGQIVY | HLA-A01:01 | SLC45A2 | Melanoma | 7154 |
| YSAHNSTEFLIY | HLA-A01:01 | SLC45A2 | Melanoma | 7155 |
| FIDGPIKAY | HLA-A01:01 | SLC45A2 | Melanoma | 7156 |
| YTVPFNLITEY | HLA-A01:01 | SLC45A2 | Melanoma | 7157 |
| FLSPILGFL | HLA-A02:01 | SLC45A2 | Melanoma | 7158 |
| SLYSIVWFL | HLA-A02:01 | SLC45A2 | Melanoma | 7159 |
| FLSNMLFFT | HLA-A02:01 | SLC45A2 | Melanoma | 7160 |
| HLIGWTAFL | HLA-A02:01 | SLC45A2 | Melanoma | 7161 |
| SLYSYFQKV | HLA-A02:01 | SLC45A2 | Melanoma | 7162 |
| FLSPILGFLL | HLA-A02:01 | SLC45A2 | Melanoma | 7163 |
| VMSSTLYTV | HLA-A02:01 | SLC45A2 | Melanoma | 7164 |
| YLLGAIDWA | HLA-A02:01 | SLC45A2 | Melanoma | 7165 |
| LVLCSLFGV | HLA-A02:01 | SLC45A2 | Melanoma | 7166 |
| VMFFFSALV | HLA-A02:01 | SLC45A2 | Melanoma | 7167 |
| RLLGTEFQV | HLA-A02:01 | SLC45A2 | Melanoma | 7168 |
| SLADDGPPDSV | HLA-A02:01 | SLC45A2 | Melanoma | 7169 |
| GMYEYGSIEKV | HLA-A02:01 | SLC45A2 | Melanoma | 7170 |
| FLIYERGVEV | HLA-A02:01 | SLC45A2 | Melanoma | 7171 |
| TLYTVPFNL | HLA-A02:01 | SLC45A2 | Melanoma | 7172 |
| GMYEYGSIEK | HLA-A03:01 | SLC45A2 | Melanoma | 7173 |
| KVLVSYIGLK | HLA-A03:01 | SLC45A2 | Melanoma | 7174 |
| SVFSSLYSCK | HLA-A03:01 | SLC45A2 | Melanoma | 7175 |
| VLVSYIGLK | HLA-A03:01 | SLC45A2 | Melanoma | 7176 |
| ALIANPRRK | HLA-A03:01 | SLC45A2 | Melanoma | 7177 |
| SVFSSLYSY | HLA-A03:01 | SLC45A2 | Melanoma | 7178 |
| SSLYSYFQK | HLA-A11:01 | SLC45A2 | Melanoma | 7179 |
| SVFSSLYSCK | HLA-A11:01 | SLC45A2 | Melanoma | 7180 |
| SVFSSLYSYFQK | HLA-A11:01 | SLC45A2 | Melanoma | 7181 |
| SVFSSLYSY | HLA-A11:01 | SLC45A2 | Melanoma | 7182 |
| STEFLIYER | HLA-A11:01 | SLC45A2 | Melanoma | 7183 |
| RYLCISHLI | HLA-A24:02 | SLC45A2 | Melanoma | 7184 |
| LYFTGYLLF | HLA-A24:02 | SLC45A2 | Melanoma | 7185 |
| GLYFTGYLLF | HLA-A24:02 | SLC45A2 | Melanoma | 7186 |
| YRYLCISHLI | HLA-A24:02 | SLC45A2 | Melanoma | 7187 |
| VFSSLYSYF | HLA-A24:02 | SLC45A2 | Melanoma | 7188 |
| LYTVPFNLI | HLA-A24:02 | SLC45A2 | Melanoma | 7189 |
| SYIGLKGLYF | HLA-A24:02 | SLC45A2 | Melanoma | 7190 |
| GTRRAMTLK | HLA-A30:01 | SLC45A2 | Melanoma | 7191 |
| QTRRAMTLK | HLA-A30:01 | SLC45A2 | Melanoma | 7192 |
| RSRWGRRRPYI | HLA-A30:01 | SLC45A2 | Melanoma | 7193 |
| KVKNGYVNP | HLA-A30:01 | SLC45A2 | Melanoma | 7194 |
| GFIGLFPNV | HLA-A30:01 | SLC45A2 | Melanoma | 7195 |
| RSRWGRRRPY | HLA-A30:01 | SLC45A2 | Melanoma | 7196 |
| GQAGRHIYK | HLA-A30:01 | SLC45A2 | Melanoma | 7197 |
| DFMGQIVYR | HLA-A33:03 | SLC45A2 | Melanoma | 7198 |
| LVNMPPHYR | HLA-A33:03 | SLC45A2 | Melanoma | 7199 |
| TDFMGQIVYR | HLA-A33:03 | SLC45A2 | Melanoma | 7200 |
| STEFLIYER | HLA-A33:03 | SLC45A2 | Melanoma | 7201 |
| HYHALFTGTR | HLA-A33:03 | SLC45A2 | Melanoma | 7202 |
| RPYILTLGVM | HLA-B07:02 | SLC45A2 | Melanoma | 7203 |
| RPTSRLIMHSM | HLA-B07:02 | SLC45A2 | Melanoma | 7204 |
| FPNVYSTLVI | HLA-B07:02 | SLC45A2 | Melanoma | 7205 |
| RPTSRLIM | HLA-B07:02 | SLC45A2 | Melanoma | 7206 |
| QPPHWMDSL | HLA-B07:02 | SLC45A2 | Melanoma | 7207 |
| TPVLLSVGL | HLA-B07:02 | SLC45A2 | Melanoma | 7208 |
| GPDCVPRGSL | HLA-B07:02 | SLC45A2 | Melanoma | 7209 |
| WGRRRPYIL | HLA-B08:01 | SLC45A2 | Melanoma | 7210 |
| NPRRKLVWAI | HLA-B08:01 | SLC45A2 | Melanoma | 7211 |
| RLIMHSMAM | HLA-B08:01 | SLC45A2 | Melanoma | 7212 |
| TLKSLLRAL | HLA-B08:01 | SLC45A2 | Melanoma | 7213 |
| LIYERGVEV | HLA-B08:01 | SLC45A2 | Melanoma | 7214 |
| DGPIKAYL | HLA-B08:01 | SLC45A2 | Melanoma | 7215 |
| TGTRRAMTL | HLA-B08:01 | SLC45A2 | Melanoma | 7216 |
| YEYGSIEKV | HLA-B13:02 | SLC45A2 | Melanoma | 7217 |
| FDFAADFIDGPI | HLA-B13:02 | SLC45A2 | Melanoma | 7218 |
| FDFAADFI | HLA-B13:02 | SLC45A2 | Melanoma | 7219 |
| VEAAYVTPV | HLA-B13:02 | SLC45A2 | Melanoma | 7220 |
| SLYSYFQKV | HLA-B13:02 | SLC45A2 | Melanoma | 7221 |
| RLLGTEFQV | HLA-B13:02 | SLC45A2 | Melanoma | 7222 |
| SLYSIVWFL | HLA-B13:02 | SLC45A2 | Melanoma | 7223 |
| YSAHNSTEF | HLA-B46:01 | SLC45A2 | Melanoma | 7224 |
| FGVMSSTLY | HLA-B46:01 | SLC45A2 | Melanoma | 7225 |
| FLSPILGFL | HLA-B46:01 | SLC45A2 | Melanoma | 7226 |
| SVFSSLYSY | HLA-B46:01 | SLC45A2 | Melanoma | 7227 |
| FTDFMGQIVY | HLA-B46:01 | SLC45A2 | Melanoma | 7228 |
| SSKSFWSST | HLA-B46:01 | SLC45A2 | Melanoma | 7229 |
| FIDGPIKAY | HLA-B46:01 | SLC45A2 | Melanoma | 7230 |
| SMAMFGREF | HLA-B46:01 | SLC45A2 | Melanoma | 7231 |
| ISHLIGWTAF | HLA-B46:01 | SLC45A2 | Melanoma | 7232 |
| FLSPILGFL | HLA-C01:02 | SLC45A2 | Melanoma | 7233 |
| NMPPHYRYL | HLA-C01:02 | SLC45A2 | Melanoma | 7234 |
| SLPVQHAVL | HLA-C01:02 | SLC45A2 | Melanoma | 7235 |
| YSAHNSTEF | HLA-C01:02 | SLC45A2 | Melanoma | 7236 |
| LFPNVYSTL | HLA-C01:02 | SLC45A2 | Melanoma | 7237 |
| SLPVQHAV | HLA-C01:02 | SLC45A2 | Melanoma | 7238 |
| YSAHNSTEF | HLA-C03:04 | SLC45A2 | Melanoma | 7239 |
| HASSLPLPL | HLA-C03:04 | SLC45A2 | Melanoma | 7240 |
| LSVGLPSSL | HLA-C03:04 | SLC45A2 | Melanoma | 7241 |
| YSTLVLCSL | HLA-C03:04 | SLC45A2 | Melanoma | 7242 |
| GAIDWAHLEL | HLA-C03:04 | SLC45A2 | Melanoma | 7243 |
| AAYVTPVLL | HLA-C03:04 | SLC45A2 | Melanoma | 7244 |
| AAYVTPVL | HLA-C03:04 | SLC45A2 | Melanoma | 7245 |
| AIDWAHLEL | HLA-C03:04 | SLC45A2 | Melanoma | 7246 |
| LFDFAADFI | HLA-C04:01 | SLC45A2 | Melanoma | 7247 |
| LFPNVYSTI | HLA-C04:01 | SLC45A2 | Melanoma | 7248 |
| FLSPILGFL | HLA-C04:01 | SLC45A2 | Melanoma | 7249 |
| AIDWAHLEL | HLA-C04:01 | SLC45A2 | Melanoma | 7250 |
| LFDFAADF | HLA-C04:01 | SLC45A2 | Melanoma | 7251 |
| YRYLCISHL | HLA-C07:01 | SLC45A2 | Melanoma | 7252 |
| RRRPYILTL | HLA-C07:01 | SLC45A2 | Melanoma | 7253 |
| YRYLCISHLI | HLA-C07:01 | SLC45A2 | Melanoma | 7254 |
| RRAMTLKSL | HLA-C07:01 | SLC45A2 | Melanoma | 7255 |
| RRPYILTL | HLA-C07:01 | SLC45A2 | Melanoma | 7256 |
| TDFMGQIVY | HLA-C07:01 | SLC45A2 | Melanoma | 7257 |
| RRRPYILTL | HLA-C07:02 | SLC45A2 | Melanoma | 7258 |
| YRYLCISHL | HLA-C07:02 | SLC45A2 | Melanoma | 7259 |
| NMPPHYRYL | HLA-C07:02 | SLC45A2 | Melanoma | 7260 |
| RRAMTLKSL | HLA-C07:02 | SLC45A2 | Melanoma | 7261 |
| LYFTGYLLF | HLA-C07:02 | SLC45A2 | Melanoma | 7262 |
| KRPTSRLIM | HLA-C07:02 | SLC45A2 | Melanoma | 7263 |
| RRPYILTL | HLA-C07:02 | SLC45A2 | Melanoma | 7264 |
| MSGAQDNSCLY | HLA-A01:01 | SPATA8 | Testis | 7265 |
| GMSGAQDNSCLY | HLA-A01:01 | SPATA8 | Testis | 7266 |
| GAQDNSCLY | HLA-A01:01 | SPATA8 | Testis | 7267 |
| AQDNSCLY | HLA-A01:01 | SPATA8 | Testis | 7268 |
| DSEDKQEKC | HLA-A01:01 | SPATA8 | Testis | 7269 |
| PTDSEDKQ | HLA-A01:01 | SPATA8 | Testis | 7270 |
| GLKGPVWPA | HLA-A02:01 | SPATA8 | Testis | 7271 |
| CLYQEIAPS | HLA-A02:01 | SPATA8 | Testis | 7272 |
| GGLKGPVWPA | HLA-A02:01 | SPATA8 | Testis | 7273 |
| RVPSASPLI | HLA-A02:01 | SPATA8 | Testis | 7274 |
| SCLYQEIAPS | HLA-A02:01 | SPATA8 | Testis | 7275 |
| VLFHPYCWS | HLA-A02:01 | SPATA8 | Testis | 7276 |
| CLYQEIAPSF | HLA-A02:01 | SPATA8 | Testis | 7277 |
| CPVSPILLVL | HLA-A02:01 | SPATA8 | Testis | 7278 |
| GLKGPVWPAK | HLA-A02:01 | SPATA8 | Testis | 7279 |
| PVSPILLVL | HLA-A02:01 | SPATA8 | Testis | 7280 |
| EIAPSFQRL | HLA-A02:01 | SPATA8 | Testis | 7281 |
| SASPLIQKI | HLA-A02:01 | SPATA8 | Testis | 7282 |
| GVACKGREQL | HLA-A02:01 | SPATA8 | Testis | 7283 |
| CPVSPILLV | HLA-A02:01 | SPATA8 | Testis | 7284 |
| ILLVLIFQ | HLA-A02:01 | SPATA8 | Testis | 7285 |
| GLKGPVWPAK | HLA-A03:01 | SPATA8 | Testis | 7286 |
| AMTCPCGWRPFK | HLA-A03:01 | SPATA8 | Testis | 7287 |
| RVPSASPLIQK | HLA-A03:01 | SPATA8 | Testis | 7288 |
| PSASPLIQK | HLA-A03:01 | SPATA8 | Testis | 7289 |
| VPSASPLIQK | HLA-A11:01 | SPATA8 | Testis | 7290 |
| RVPSASPLIQK | HLA-A11:01 | SPATA8 | Testis | 7291 |
| MTCPCGWRPFK | HLA-A11:01 | SPATA8 | Testis | 7292 |
| PSASPLIQK | HLA-A11:01 | SPATA8 | Testis | 7293 |
| SASPLIQK | HLA-A11:01 | SPATA8 | Testis | 7294 |
| LYQEIAPSF | HLA-A24:02 | SPATA8 | Testis | 7295 |
| CLYQEIAPSF | HLA-A24:02 | SPATA8 | Testis | 7296 |
| SCLYQEIAPSF | HLA-A24:02 | SPATA8 | Testis | 7297 |
| KINRRSVLF | HLA-A24:02 | SPATA8 | Testis | 7298 |
| KCPVSPILL | HLA-A24:02 | SPATA8 | Testis | 7299 |
| RVQRRRVPSA | HLA-A30:01 | SPATA8 | Testis | 7300 |
| RVQRRRVPS | HLA-A30:01 | SPATA8 | Testis | 7301 |
| RTSSRHFSEA | HLA-A30:01 | SPATA8 | Testis | 7302 |
| PSASPLIQK | HLA-A30:01 | SPATA8 | Testis | 7303 |
| SRKDPKGSK | HLA-A30:01 | SPATA8 | Testis | 7304 |
| GLKGPVWPAK | HLA-A30:01 | SPATA8 | Testis | 7305 |
| SFQRLPCPR | HLA-A33:03 | SPATA8 | Testis | 7306 |
| EAMTCPCGWR | HLA-A33:03 | SPATA8 | Testis | 7307 |
| EAFQGWPRR | HLA-A33:03 | SPATA8 | Testis | 7308 |
| EIAPSFQR | HLA-A33:03 | SPATA8 | Testis | 7309 |
| EENSCSHGR | HLA-A33:03 | SPATA8 | Testis | 7310 |
| WPRRPQGPGV | HLA-B07:02 | SPATA8 | Testis | 7311 |
| RPFKGGPGGL | HLA-B07:02 | SPATA8 | Testis | 7312 |
| RPQGPGVAC | HLA-B07:02 | SPATA8 | Testis | 7313 |
| CPRTSSRHF | HLA-B07:02 | SPATA8 | Testis | 7314 |
| SPILLVLIF | HLA-B07:02 | SPATA8 | Testis | 7315 |
| VQRRRVPSA | HLA-B08:01 | SPATA8 | Testis | 7316 |
| IQKINRRSVL | HLA-B08:01 | SPATA8 | Testis | 7317 |
| LIQKINRRSVL | HLA-B08:01 | SPATA8 | Testis | 7318 |
| SPILLVLI | HLA-B08:01 | SPATA8 | Testis | 7319 |
| VSPILLVL | HLA-B08:01 | SPATA8 | Testis | 7320 |
| CPVSPILL | HLA-B08:01 | SPATA8 | Testis | 7321 |
| CPVSPILLV | HLA-B13:02 | SPATA8 | Testis | 7322 |
| QEIAPSFQRL | HLA-B13:02 | SPATA8 | Testis | 7323 |
| KQEKCPVSPI | HLA-B13:02 | SPATA8 | Testis | 7324 |
| ISASPLIQKI | HLA-B13:02 | SPATA8 | Testis | 7325 |
| CSHGRIQRV | HLA-B13:02 | SPATA8 | Testis | 7326 |
| ASPLIQKI | HLA-B13:02 | SPATA8 | Testis | 7327 |
| GAQDNSCLY | HLA-B46:01 | SPATA8 | Testis | 7328 |
| SSRHFSEAM | HLA-B46:01 | SPATA8 | Testis | 7329 |
| MTCPCGWRPF | HLA-B46:01 | SPATA8 | Testis | 7330 |
| PAKEENSCSH | HLA-B46:01 | SPATA8 | Testis | 7331 |
| SRKDPKGSK | HLA-B46:01 | SPATA8 | Testis | 7332 |
| RVPSASPLI | HLA-C01:02 | SPATA8 | Testis | 7333 |
| SSRHFSEAM | HLA-C01:02 | SPATA8 | Testis | 7334 |
| KINRRSVLF | HLA-C01:02 | SPATA8 | Testis | 7335 |
| LAPSFQRL | HLA-C01:02 | SPATA8 | Testis | 7336 |
| RVPSASPL | HLA-C01:02 | SPATA8 | Testis | 7337 |
| VSPILLVL | HLA-C01:02 | SPATA8 | Testis | 7338 |
| SSRHFSEAM | HLA-C03:04 | SPATA8 | Testis | 7339 |
| SASPLIQKI | HLA-C03:04 | SPATA8 | Testis | 7340 |
| RVPSASPLI | HLA-C03:04 | SPATA8 | Testis | 7341 |
| VSPILLVL | HLA-C03:04 | SPATA8 | Testis | 7342 |
| IAPSFQRL | HLA-C03:04 | SPATA8 | Testis | 7343 |
| PVSPILLVL | HLA-C03:04 | SPATA8 | Testis | 7344 |
| LYQEIAPSF | HLA-C04:01 | SPATA8 | Testis | 7345 |
| RVPSASPLI | HLA-C04:01 | SPATA8 | Testis | 7346 |
| KINRRSVLF | HLA-C04:01 | SPATA8 | Testis | 7347 |
| KCPVSPILL | HLA-C04:01 | SPATA8 | Testis | 7348 |
| VSPILLVLI | HLA-C04:01 | SPATA8 | Testis | 7349 |
| RRVPSASPL | HLA-C07:01 | SPATA8 | Testis | 7350 |
| RRVPSASPLI | HLA-C07:01 | SPATA8 | Testis | 7351 |
| CSHGRIQRV | HLA-C07:01 | SPATA8 | Testis | 7352 |
| RRSVLFHPY | HLA-C07:01 | SPATA8 | Testis | 7353 |
| RRPQGPGVA | HLA-C07:01 | SPATA8 | Testis | 7354 |
| LYQEIAPSF | HLA-C07:02 | SPATA8 | Testis | 7355 |
| RRVPSASPL | HLA-C07:02 | SPATA8 | Testis | 7356 |
| RRSVLFHPY | HLA-C07:02 | SPATA8 | Testis | 7357 |
| NRRSVLFHPY | HLA-C07:02 | SPATA8 | Testis | 7358 |
| YSEKISYVY | HLA-A01:01 | SSX1 | Liver; Melanoma; Thyroid | 2359 |
| KYSEKISYVY | HLA-A01:01 | SSX1 | Liver; Melanoma; Thyroid | 7360 |
| ATDFQGNDF | HLA-A01:01 | SSX1 | Liver; Melanoma; Thyroid | 7361 |
| ATDFQGNDFD | HLA-A01:01 | SSX1 | Liver; Melanoma; Thyroid | 7362 |
| AMTKLGFKV | HLA-A02:01 | SSX1 | Liver; Melanoma; Thyroid | 7363 |
| RLHRIPKI | HLA-A02:01 | SSX1 | Liver; Melanoma; Thyroid | 7364 |
| MTFGRLHRI | HLA-A02:01 | SSX1 | Liver; Melanoma; Thyroid | 7365 |
| KMKYSEKISYV | HLA-A02:01 | SSX1 | Liver; Melanoma; Thyroid | 7366 |
| KAMTKLGFKV | HLA-A02:01 | SSX1 | Liver; Melanoma; Thyroid | 7367 |
| QMTFGRLHRI | HLA-A02:01 | SSX1 | Liver; Melanoma; Thyroid | 7368 |
| YKAMTKLGFKV | HLA-A02:01 | SSX1 | Liver; Melanoma; Thyroid | 7369 |
| KQLVIYEEL | HLA-A02:01 | SSX1 | Liver; Melanoma; Thyroid | 7370 |
| KKMKYSEKISYV | HLA-A02:01 | SSX1 | Liver; Melanoma; Thyroid | 7371 |
| RLRERKQLV | HLA-A02:01 | SSX1 | Liver; Melanoma; Thyroid | 7372 |
| KYSEKISYV | HLA-A02:01 | SSX1 | Liver; Melanoma; Thyroid | 7373 |
| KLGFKVTL | HLA-A02:01 | SSX1 | Liver; Melanoma; Thyroid | 7374 |
| TKLGFKVTL | HLA-A02:01 | SSX1 | Liver; Melanoma; Thyroid | 7375 |
| RLRERKQLVI | HLA-A02:01 | SSX1 | Liver; Melanoma; Thyroid | 7376 |
| KLGFKVTLP | HLA-A02:01 | SSX1 | Liver; Melanoma; Thyroid | 7377 |
| KAFDDIATY | HLA-A02:01 | SSX1 | Liver; Melanoma; Thyroid | 7378 |
| RIIPKIMPK | HLA-A03:01 | SSX1 | Liver; Melanoma; Thyroid | 7379 |
| YVYMKRNYK | HLA-A03:01 | SSX1 | Liver; Melanoma; Thyroid | 7380 |
| RIIPKIMPKK | HLA-A03:01 | SSX1 | Liver; Melanoma; Thyroid | 7381 |
| VTLPPFMCNK | HLA-A03:01 | SSX1 | Liver; Melanoma; Thyroid | 7382 |
| RIPKIMPK | HLA-A11:01 | SSX1 | Liver; Melanoma; Thyroid | 7383 |
| MTFGRLHRIIPK | HLA-A11:01 | SSX1 | Liver; Melanoma; Thyroid | 7384 |
| VTLPPFMQNK | HLA-A11:01 | SSX1 | Liver; Melanoma; Thyroid | 7385 |
| ATYFSKKEWKK | HLA-A11:01 | SSX1 | Liver; Melanoma; Thyroid | 7386 |
| KYSEKISYV | HLA-A24:02 | SSX1 | Liver; Melanoma; Thyroid | 7387 |
| VYMKRNYKAM | HLA-A24:02 | SSX1 | Liver; Melanoma; Thyroid | 7388 |
| NYKAMTKLGF | HLA-A24:02 | SSX1 | Liver; Melanoma; Thyroid | 7389 |
| AFDDIATYF | HLA-A24:02 | SSX1 | Liver; Melanoma; Thyroid | 7390 |
| KAMTKLGFK | HLA-A30:01 | SSX1 | Liver; Melanoma; Thyroid | 7391 |
| RIIPKIMPK | HLA-A30:01 | SSX1 | Liver; Melanoma; Thyroid | 7392 |
| YVYMKRNYK | HLA-A30:01 | SSX1 | Liver; Melanoma; Thyroid | 7393 |
| RIIPKIMPKK | HLA-A30:01 | SSX1 | Liver; Melanoma; Thyroid | 7394 |
| KYSEKISYV | HLA-A30:01 | SSX1 | Liver; Melanoma; Thyroid | 7395 |
| MTFGRLHR | HLA-A33:03 | SSX1 | Liver; Melanoma; Thyroid | 7396 |
| YVYMKRNYK | HLA-A33:03 | SSX1 | Liver; Melanoma; Thyroid | 7397 |
| HAWTHRLRER | HLA-A33:03 | SSX1 | Liver; Melanoma; Thyroid | 7398 |
| NISEKINKR | HLA-A33:03 | SSX1 | Liver; Melanoma; Thyroid | 7399 |
| NDFDNDHNR | HLA-A33:03 | SSX1 | Liver; Melanoma; Thyroid | 7400 |
| HPQMTFGRL | HLA-B07:02 | SSX1 | Liver; Melanoma; Thyroid | 7401 |
| RPRDDAKAS | HLA-B07:02 | SSX1 | Liver; Melanoma; Thyroid | 7402 |
| GPQNDGKQL | HLA-B07:02 | SSX1 | Liver; Melanoma; Thyroid | 7403 |
| EHPQMTFGRL | HLA-B07:02 | SSX1 | Liver; Melanoma; Thyroid | 7404 |
| YMKRNYKAM | HLA-B08:01 | SSX1 | Liver; Melanoma; Thyroid | 7405 |
| VYMKRNYKAM | HLA-B08:01 | SSX1 | Liver; Melanoma; Thyroid | 7406 |
| YMKRNYKAMTKL | HLA-B08:01 | SSX1 | Liver; Melanoma; Thyroid | 7407 |
| KLGFKVTL | HLA-B08:01 | SSX1 | Liver; Melanoma; Thyroid | 7408 |
| EWKKMKYSE | HLA-B08:01 | SSX1 | Liver; Melanoma; Thyroid | 7409 |
| RLRERKQLV | HLA-B08:01 | SSX1 | Liver; Melanoma; Thyroid | 7410 |
| KQLVIYEEI | HLA-B13:02 | SSX1 | Liver; Melanoma; Thyroid | 7411 |
| MTFGRLHRI | HLA-B13:02 | SSX1 | Liver; Melanoma; Thyroid | 7412 |
| KAMTKLGFKV | HLA-B13:02 | SSX1 | Liver; Melanoma; Thyroid | 7413 |
| RLHRIIPKI | HLA-B13:02 | SSX1 | Liver; Melanoma; Thyroid | 7414 |
| RLRERKQLV | HLA-B13:02 | SSX1 | Liver; Melanoma; Thyroid | 7415 |
| KAFDDIATY | HLA-B46:01 | SSX1 | Liver; Melanoma; Thyroid | 7416 |
| YMKRNYKAM | HLA-B46:01 | SSX1 | Liver; Melanoma; Thyroid | 7417 |
| YSEKISYVY | HLA-B46:01 | SSX1 | Liver; Melanoma; Thyroid | 7418 |
| ISYVYMKRNY | HLA-B46:01 | SSX1 | Liver; Melanoma; Thyroid | 7419 |
| YMKRNYKAM | HLA-C01:02 | SSX1 | Liver; Melanoma; Thyroid | 7420 |
| MTFGRLHRI | HLA-C01:02 | SSX1 | Liver; Melanoma; Thyroid | 7421 |
| AFDDIATYF | HLA-C01:02 | SSX1 | Liver; Melanoma; Thyroid | 7422 |
| SGPQNDGKQL | HLA-C01:02 | SSX1 | Liver; Melanoma; Thyroid | 7423 |
| TLPPFMCN | HLA-C01:02 | SSX1 | Liver; Melanoma; Thyroid | 7424 |
| SGPKRGKHAW | HLA-C01:02 | SSX1 | Liver; Melanoma; Thyroid | 7425 |
| MTFGRLHRI | HLA-C03:04 | SSX1 | Liver; Melanoma; Thyroid | 7426 |
| KAFDDIATY | HLA-C03:04 | SSX1 | Liver; Melanoma; Thyroid | 7427 |
| YMKRNYKAM | HLA-C03:04 | SSX1 | Liver; Melanoma; Thyroid | 7428 |
| VTLPPFMCN | HLA-C03:04 | SSX1 | Liver; Melanoma; Thyroid | 7429 |
| FKVTLPPFM | HLA-C03:04 | SSX1 | Liver; Melanoma; Thyroid | 7430 |
| AFDDIATYF | HLA-C04:01 | SSX1 | Liver; Melanoma; Thyroid | 7431 |
| KAFDDIATYF | HLA-C04:01 | SSX1 | Liver; Melanoma; Thyroid | 7432 |
| RSKAFDDIATYF | HLA-C04:01 | SSX1 | Liver; Melanoma; Thyroid | 7433 |
| AFDDIATY | HLA-C04:01 | SSX1 | Liver; Melanoma; Thyroid | 7434 |
| FDDIATYF | HLA-C04:01 | SSX1 | Liver; Melanoma; Thyroid | 7435 |
| MTFGRLHRI | HLA-C07:01 | SSX1 | Liver; Melanoma; Thyroid | 7436 |
| LRERKQLVI | HLA-C07:01 | SSX1 | Liver; Melanoma; Thyroid | 7437 |
| KRNYKAMTKL | HLA-C07:01 | SSX1 | Liver; Melanoma; Thyroid | 7438 |
| FKVTIPPFM | HLA-C07:01 | SSX1 | Liver; Melanoma; Thyroid | 7439 |
| KAFDDIATY | HLA-C07:01 | SSX1 | Liver; Melanoma; Thyroid | 7440 |
| KRGKHAWTH | HLA-C07:01 | SSX1 | Liver; Melanoma; Thyroid | 7441 |
| SYVYMKRNY | HLA-C07:01 | SSX1 | Liver; Melanoma; Thyroid | 7442 |
| MTFGRLHRI | HLA-C07:02 | SSX1 | Liver; Melanoma; Thyroid | 7443 |
| KYSEKISYV | HLA-C07:02 | SSX1 | Liver; Melanoma; Thyroid | 7444 |
| YMKRNYKAM | HLA-C07:02 | SSX1 | Liver; Melanoma; Thyroid | 7445 |
| KYSEKISYVY | HLA-C07:02 | SSX1 | Liver; Melanoma; Thyroid | 7446 |
| KYSEKISY | HLA-C07:02 | SSX1 | Liver; Melanoma; Thyroid | 7447 |
| KRQKHAWTH | HLA-C07:02 | SSX1 | Liver; Melanoma; Thyroid | 7448 |
| YSDQELAY | HLA-A01:01 | STAR | Adrenal Gland | 7449 |
| VVDQPMERLY | HLA-A01:01 | STAR | Adrenal Gland | 7450 |
| YSDQELAYL | HLA-A01:01 | STAR | Adrenal Gland | 7451 |
| AMGEWNPNV | HLA-A02:01 | STAR | Adrenal Gland | 7452 |
| KVMSKVVPDV | HLA-A02:01 | STAR | Adrenal Gland | 7453 |
| VMSKVVPDV | HLA-A02:01 | STAR | Adrenal Gland | 7454 |
| RLYEELVERM | HLA-A02:01 | STAR | Adrenal Gland | 7455 |
| MLLATFKL | HLA-A02:01 | STAR | Adrenal Gland | 7456 |
| AVMAISQEL | HLA-A02:01 | STAR | Adrenal Gland | 7457 |
| KLTWLLSIDI | HLA-A02:01 | STAR | Adrenal Gland | 7458 |
| WLPKSIINQV | HLA-A02:01 | STAR | Adrenal Gland | 7459 |
| RLYEELVERMEA | HLA-A02:01 | STAR | Adrenal Gland | 7460 |
| MLLATFKLCA | HLA-A02:01 | STAR | Adrenal Gland | 7461 |
| RLYEELVER | HLA-A02:01 | STAR | Adrenal Gland | 7462 |
| TLYSDQELA | HLA-A02:01 | STAR | Adrenal Gland | 7463 |
| TLYSDQELAYL | HLA-A02:01 | STAR | Adrenal Gland | 7464 |
| ALGGPTPST | HLA-A02:01 | STAR | Adrenal Gland | 7465 |
| YLQQGEEAM | HLA-A02:01 | STAR | Adrenal Gland | 7466 |
| TLYSDQEL | HLA-A02:01 | STAR | Adrenal Gland | 7467 |
| SSYRHMRNMK | HLA-A03:01 | STAR | Adrenal Gland | 7468 |
| SAWSPTLPLK | HLA-A03:01 | STAR | Adrenal Gland | 7469 |
| KVMSKVVPDVGK | HLA-A03:01 | STAR | Adrenal Gland | 7470 |
| RLYEELVER | HLA-A03:01 | STAR | Adrenal Gland | 7471 |
| AWSPTLPLK | HLA-A03:01 | STAR | Adrenal Gland | 7472 |
| SAWSPTLPLK | HLA-A11:01 | STAR | Adrenal Gland | 7473 |
| SSYRHMRNMK | HLA-A11:01 | STAR | Adrenal Gland | 7474 |
| SIDLKGWLPK | HLA-A11:01 | STAR | Adrenal Gland | 7475 |
| AVMAISQELNR | HLA-A11:01 | STAR | Adrenal Gland | 7476 |
| STWINQVRR | HLA-ALL:01 | STAR | Adrenal Gland | 7477 |
| LYSDQELAYL | HLA-A24:02 | STAR | Adrenal Gland | 7478 |
| RWILPTTCASAW | HLA-A24:02 | STAR | Adrenal Gland | 7479 |
| TWLLSIDLKGW | HLA-A24:02 | STAR | Adrenal Gland | 7480 |
| VVPDVGKVF | HLA-A24:02 | STAR | Adrenal Gland | 7481 |
| VLSQTQVDF | HLA-A24:02 | STAR | Adrenal Gland | 7482 |
| KTKLTWLLS | HLA-A30:01 | STAR | Adrenal Gland | 7483 |
| KTKLTWLLSI | HLA-A30:01 | STAR | Adrenal Gland | 7484 |
| SSYRHMRNMK | HLA-A30:01 | STAR | Adrenal Gland | 7485 |
| NVKEIKVLQK | HLA-A30:01 | STAR | Adrenal Gland | 7486 |
| SYRHMRNMK | HLA-A30:01 | STAR | Adrenal Gland | 7487 |
| CAQLHWYTR | HLA-A33:03 | STAR | Adrenal Gland | 7488 |
| DFVSVRCAKR | HLA-A33:03 | STAR | Adrenal Gland | 7489 |
| FVSVRCAKR | HLA-A33:03 | STAR | Adrenal Gland | 7490 |
| DFANHLRKR | HLA-A33:03 | STAR | Adrenal Gland | 7491 |
| STWINQVRR | HLA-A33:03 | STAR | Adrenal Gland | 7492 |
| RPRWILPTT | HLA-B07:02 | STAR | Adrenal Gland | 7493 |
| RPRWILPTTC | HLA-B07:02 | STAR | Adrenal Gland | 7494 |
| SPSKTKLTWL | HLA-B07:02 | STAR | Adrenal Gland | 7495 |
| LPKSIINQVL | HLA-B07:02 | STAR | Adrenal Gland | 7496 |
| QPAVPNCAQL | HLA-B07:02 | STAR | Adrenal Gland | 7497 |
| CPRPRWIL | HLA-B07:02 | STAR | Adrenal Gland | 7498 |
| NQVRRRSSL | HLA-B08:01 | STAR | Adrenal Gland | 7499 |
| QVRRRSSLL | HLA-B08:01 | STAR | Adrenal Gland | 7500 |
| QVRRRSSL | HLA-B08:01 | STAR | Adrenal Gland | 7501 |
| NVKEIKVL | HLA-B08:01 | STAR | Adrenal Gland | 7502 |
| HLRKRLESH | HLA-B08:01 | STAR | Adrenal Gland | 7503 |
| TLYSDQEL | HLA-B08:01 | STAR | Adrenal Gland | 7504 |
| KEIKVLQKI | HLA-B13:02 | STAR | Adrenal Gland | 7505 |
| MERLYEELV | HLA-B13:02 | STAR | Adrenal Gland | 7506 |
| GEWNPNVKEI | HLA-B13:02 | STAR | Adrenal Gland | 7507 |
| SQQDNGDKY | HLA-B13:02 | STAR | Adrenal Gland | 7508 |
| RLYEELVER | HLA-B13:02 | STAR | Adrenal Gland | 7509 |
| SSYRHMRNM | HLA-B46:01 | STAR | Adrenal Gland | 7510 |
| SAWSPTLPL | HLA-B46:01 | STAR | Adrenal Gland | 7511 |
| YLQQGEEAM | HLA-B46:01 | STAR | Adrenal Gland | 7512 |
| VVPDVGKVF | HLA-B46:01 | STAR | Adrenal Gland | 7513 |
| HLRKRLESH | HLA-B46:01 | STAR | Adrenal Gland | 7514 |
| SAWSPTLPL | HLA-C01:02 | STAR | Adrenal Gland | 7515 |
| YSDQELAYL | HLA-C01:02 | STAR | Adrenal Gland | 7516 |
| CASAWSPTL | HLA-C01:02 | STAR | Adrenal Gland | 7517 |
| ILPTTCASAW | HLA-C01:02 | STAR | Adrenal Gland | 7518 |
| VGPRDFVSV | HLA-C01:02 | STAR | Adrenal Gland | 7519 |
| SAWSPTLPL | HLA-C03:04 | STAR | Adrenal Gland | 7520 |
| LAAEAAGNL | HLA-C03:04 | STAR | Adrenal Gland | 7521 |
| CASAWSPTL | HLA-C03:04 | STAR | Adrenal Gland | 7522 |
| FANHLRKRL | HLA-C03:04 | STAR | Adrenal Gland | 7523 |
| YSDQELAYL | HLA-C04:01 | STAR | Adrenal Gland | 7524 |
| LYEELVERM | HLA-C04:01 | STAR | Adrenal Gland | 7525 |
| SAWSPTLPL | HLA-C04:01 | STAR | Adrenal Gland | 7526 |
| VFRLEVVV | HLA-C04:01 | STAR | Adrenal Gland | 7527 |
| LRQQAVMAI | HLA-C07:01 | STAR | Adrenal Gland | 7528 |
| YRHMRNMKGL | HLA-C07:01 | STAR | Adrenal Gland | 7529 |
| SSYRHMRNM | HLA-C07:01 | STAR | Adrenal Gland | 7530 |
| RRGSTCVL | HLA-C07:01 | STAR | Adrenal Gland | 7531 |
| KRRQSTCVL | HLA-C07:01 | STAR | Adrenal Gland | 7532 |
| RRGSTCVLA | HLA-C07:01 | STAR | Adrenal Gland | 7533 |
| LRQQAVMAI | HLA-C07:02 | STAR | Adrenal Gland | 7534 |
| YRHMRNMIKGL | HLA-C07:02 | STAR | Adrenal Gland | 7535 |
| KRRGSTCVL | HLA-C07:02 | STAR | Adrenal Gland | 7536 |
| IRAEHGPTCM | HLA-C07:02 | STAR | Adrenal Gland | 7537 |
| LYSDQELAY | HLA-C07:02 | STAR | Adrenal Gland | 7538 |
| WSNAISALY | HLA-A01:01 | SYCN | Pancreas | 7539 |
| DWSNAISALY | HLA-A01:01 | SYCN | Pancreas | 7540 |
| HSDGTRICAKLY | HLA-A01:01 | SYCN | Pancreas | 7541 |
| LYDKSDPYY | HLA-A01:01 | SYCN | Pancreas | 7542 |
| LLALALASV | HLA-A02:01 | SYCN | Pancreas | 7543 |
| LLLALALASV | HLA-A02:01 | SYCN | Pancreas | 7544 |
| ILGDWSNAI | HLA-A02:01 | SYCN | Pancreas | 7545 |
| PLLLALALASV | HLA-A02:01 | SYCN | Pancreas | 7546 |
| LLALALASVP | HLA-A02:01 | SYCN | Pancreas | 7547 |
| RPLLLALALASV | HLA-A02:01 | SYCN | Pancreas | 7548 |
| RPLLLALALA | HLA-A02:01 | SYCN | Pancreas | 7549 |
| YLPSNWANTA | HLA-A02:01 | SYCN | Pancreas | 7550 |
| LLLALALASVE | HLA-A02:01 | SYCN | Pancreas | 7551 |
| ALALASVPCA | HLA-A02:01 | SYCN | Pancreas | 7552 |
| KLYDKSDPYY | HLA-A02:01 | SYCN | Pancreas | 7553 |
| PLRPLLLAL | HLA-A02:01 | SYCN | Pancreas | 7554 |
| ALASVPCA | HLA-A02:01 | SYCN | Pancreas | 7555 |
| SLESGADLPYL | HLA-A02:01 | SYCN | Pancreas | 7556 |
| ALASVPCAQ | HLA-A02:01 | SYCN | Pancreas | 7557 |
| KLYDKSDPYY | HLA-A03:01 | SYCN | Pancreas | 7558 |
| KLYDKSDPY | HLA-A03:01 | SYCN | Pancreas | 7559 |
| RTCAKLYDK | HLA-A03:01 | SYCN | Pancreas | 7560 |
| LTVWSRQGK | HLA-A03:01 | SYCN | Pancreas | 7561 |
| GTYPRLEEY | HLA-A03:01 | SYCN | Pancreas | 7562 |
| RTCAKLYDK | HLA-A11:01 | SYCN | Pancreas | 7563 |
| ASSLVVAPR | HLA-A11:01 | SYCN | Pancreas | 7564 |
| GTYPRLEEYR | HLA-A11:01 | SYCN | Pancreas | 7565 |
| GTYPRLEEYRR | HLA-A11:01 | SYCN | Pancreas | 7566 |
| KFSAGTYPRL | HLA-A24:02 | SYCN | Pancreas | 7567 |
| MSPLRPLLL | HLA-A24:02 | SYCN | Pancreas | 7568 |
| YYENCCGGAEL | HLA-A24:02 | SYCN | Pancreas | 7569 |
| EYRRGILGDW | HLA-A24:02 | SYCN | Pancreas | 7570 |
| PYLPSNWANTA | HLA-A24:02 | SYCN | Pancreas | 7571 |
| PYLPSNWAN | HLA-A24:02 | SYCN | Pancreas | 7572 |
| NWANTASSL | HLA-A24:02 | SYCN | Pancreas | 7573 |
| KTHKFSAGT | HLA-A30:01 | SYCN | Pancreas | 7574 |
| KACKTHKFSA | HLA-A30:01 | SYCN | Pancreas | 7575 |
| WSRQGKAGK | HLA-A30:01 | SYCN | Pancreas | 7576 |
| GTRTCAKLY | HLA-A30:01 | SYCN | Pancreas | 7577 |
| RTCAKLYDK | HLA-A30:01 | SYCN | Pancreas | 7578 |
| NAISALYCR | HLA-A33:03 | SYCN | Pancreas | 7579 |
| TASSLVVAPR | HLA-A33:03 | SYCN | Pancreas | 7580 |
| ASSLVVAPR | HLA-A33:03 | SYCN | Pancreas | 7581 |
| TYPRLEEYR | HLA-A33:03 | SYCN | Pancreas | 7582 |
| DLKHSDGTR | HLA-A33:03 | SYCN | Pancreas | 7583 |
| SPLRPLLLAL | HLA-B07:02 | SYCN | Pancreas | 7584 |
| RPLLLALAL | HLA-B07:02 | SYCN | Pancreas | 7585 |
| YPRLEEYRRGIL | HLA-B07:02 | SYCN | Pancreas | 7586 |
| APRCELTVW | HLA-B07:02 | SYCN | Pancreas | 7587 |
| YPRLEEYRRGIL | HLA-B08:01 | SYCN | Pancreas | 7588 |
| SPLRPLLLAL | HLA-B08:01 | SYCN | Pancreas | 7589 |
| MSPLRPLLLAL | HLA-B08:01 | SYCN | Pancreas | 7590 |
| WANTASSI | HLA-B08:01 | SYCN | Pancreas | 7591 |
| SPLRPLLL | HLA-B08:01 | SYCN | Pancreas | 7592 |
| VVAPRCEL | HLA-B08:01 | SYCN | Pancreas | 7593 |
| GDWSNAISA | HLA-B13:02 | SYCN | Pancreas | 7594 |
| GDWSNAISAL | HLA-B13:02 | SYCN | Pancreas | 7595 |
| LESGADLPYL | HLA-B13:02 | SYCN | Pancreas | 7596 |
| RLEEYRRGI | HLA-B13:02 | SYCN | Pancreas | 7597 |
| RQGKAGKT | HLA-B13:02 | SYCN | Pancreas | 7598 |
| RQGKAGKTH | HLA-B13:02 | SYCN | Pancreas | 7599 |
| WSNAISALY | HLA-B46:01 | SYCN | Pancreas | 7600 |
| GTYPRLEEY | HLA-B46:01 | SYCN | Pancreas | 7601 |
| FSAGTYPRL | HLA-B46:01 | SYCN | Pancreas | 7602 |
| KLYDKSDPY | HLA-B46:01 | SYCN | Pancreas | 7603 |
| PLRPLLLAL | HLA-B46:01 | SYCN | Pancreas | 7604 |
| MSPLRPLLL | HLA-C01:02 | SYCN | Pancreas | 7605 |
| FSAGTYPRL | HLA-C01:02 | SYCN | Pancreas | 7606 |
| LVVAPRCEL | HLA-C01:02 | SYCN | Pancreas | 7607 |
| VAPRCELTV | HLA-C01:02 | SYCN | Pancreas | 7608 |
| LRPLLLAL | HLA-C01:02 | SYCN | Pancreas | 7609 |
| FSAGTYPRL | HLA-C03:04 | SYCN | Pancreas | 7610 |
| WANTASSLV | HLA-C03:04 | SYCN | Pancreas | 7611 |
| LSLESGADL | HLA-C03:04 | SYCN | Pancreas | 7612 |
| WANTASSL | HLA-C03:04 | SYCN | Pancreas | 7613 |
| LYDKSDPYY | HLA-C04:01 | SYCN | Pancreas | 7614 |
| YYENCCGGAEL | HLA-C04:01 | SYCN | Pancreas | 7615 |
| MSPLRPLLL | HLA-C04:01 | SYCN | Pancreas | 7616 |
| NWANTASSL | HLA-C04:01 | SYCN | Pancreas | 7617 |
| MSPLRPLLL | HLA-C07:01 | SYCN | Pancreas | 7618 |
| WSNAISALY | HLA-C07:01 | SYCN | Pancreas | 7619 |
| GTYPRLEEY | HLA-C07:01 | SYCN | Pancreas | 7620 |
| YRRGILGD | HLA-C07:01 | SYQN | Pancreas | 7621 |
| ASADLKHSD | HLA-C07:01 | SYCN | Pancreas | 7622 |
| EYRRGILGD | HLA-C07:01 | SYCN | Pancreas | 7623 |
| MSPLRPLLL | HLA-C07:02 | SYCN | Pancreas | 7624 |
| LRPLLLALAL | HLA-C07:02 | SYCN | Pancreas | 7625 |
| WSNAISALY | HLA-C07:02 | SYCN | Pancreas | 7626 |
| LRPLLLAL | HLA-C07:02 | SYCN | Pancreas | 7627 |
| TYPRLEEY | HLA-C07:02 | SYCN | Pancreas | 7628 |
| CVDAEGMEVY | HLA-A01:01 | TG | Thyroid | 7629 |
| FTATSFGHPY | HLA-A01:01 | TG | Thyroid | 7630 |
| FSLFIQSLY | HLA-A01:01 | TG | Thyroid | 7631 |
| RTSSKTAFY | HLA-A01:01 | TG | Thyroid | 7632 |
| YSLEHSTDDY | HLA-A01:01 | TQ | Thyroid | 7633 |
| YSDFSTPLAH | HLA-A01:01 | TG | Thyroid | 7634 |
| STFTETTLY | HLA-A01:01 | TG | Thyroid | 7635 |
| ITESASLYF | HLA-A01:01 | TG | Thyroid | 7636 |
| YSDFSTPLA | HLA-A01:01 | TG | Thyroid | 7637 |
| WVSANIFEY | HLA-A01:01 | TG | Thyroid | 7638 |
| QVDQFLGVPY | HLA-A01:01 | TG | Thyroid | 7639 |
| TTEPEISCDFY | HLA-A01:01 | TG | Thyroid | 7640 |
| FTDLIQSGSF | HLA-A01:01 | TG | Thyroid | 7641 |
| STSPGVSEDCLY | HLA-A01:01 | TG | Thyroid | 7642 |
| STTEPEISCDFY | HLA-A01:01 | TG | Thyroid | 7643 |
| LAAQSTLSFY | HLA-A01:01 | TG | Thyroid | 7644 |
| RVEAAATWYY | HLA-A01:01 | TG | Thyroid | 7645 |
| ITESASLY | HLA-A01:01 | TG | Thyroid | 7646 |
| ILEDKVKNFY | HLA-A01:01 | TG | Thyroid | 7647 |
| SLEHSTDDY | HLA-A01:01 | TG | Thyroid | 7648 |
| LAEITESASLY | HLA-A01:01 | TG | Thyroid | 7649 |
| FTDLIQSGS | HLA-A01:01 | TG | Thyroid | 7650 |
| LLADVQFAL | HLA-A02:01 | TG | Thyroid | 7651 |
| WLFKHLFSA | HLA-A02:01 | TG | Thyroid | 7652 |
| FLLFLQHAI | HLA-A02:01 | TG | Thyroid | 7653 |
| NLFGGKFLV | HLA-A02:01 | TG | Thyroid | 7654 |
| SLLELPEFL | HLA-A02:01 | TG | Thyroid | 7655 |
| TLLASICWV | HLA-A02:01 | TG | Thyroid | 7656 |
| SLACVPCPV | HLA-A02:01 | TG | Thyroid | 7657 |
| YLLCPFPPM | HLA-A02:01 | TG | Thyroid | 7658 |
| FTLLASICWV | HLA-A02:01 | TG | Thyroid | 7659 |
| SLTEKVFKV | HLA-A02:01 | TG | Thyroid | 7660 |
| IMQYFSHFI | HLA-A02:01 | TG | Thyroid | 7661 |
| SLLELPEFLL | HLA-A02:01 | TG | Thyroid | 7662 |
| GLLDQVAAL | HLA-A02:01 | TG | Thyroid | 7663 |
| SLLSYEASV | HLA-A02:01 | TG | Thyroid | 7664 |
| LLDEIYDTI | HLA-A02:01 | TG | Thyroid | 7665 |
| VIFDANAPV | HLA-A02:01 | TG | Thyroid | 7666 |
| YLNVFIPQNY | HLA-A02:01 | TG | Thyroid | 7667 |
| FLAAVGNLI | HLA-A02:01 | TG | Thyroid | 7668 |
| LMMQKFEKV | HLA-A02:01 | TG | Thyroid | 7669 |
| NMLSGLYNPI | HLA-A02:01 | TG | Thyroid | 7670 |
| LLQTFQVFI | HLA-A02:01 | TG | Thyroid | 7671 |
| MLSGLYNPI | HLA-A02:01 | TG | Thyroid | 7672 |
| LLLDEIYDTI | HLA-A02:01 | TG | Thyroid | 7673 |
| ELLADVQFAL | HLA-A02:01 | TG | Thyroid | 7674 |
| FLVNVGQFNL | HLA-A02:01 | TG | Thyroid | 7675 |
| YLLCPFPPMA | HLA-A02:01 | TG | Thyroid | 7676 |
| FLASLLELPEFL | HLA-A02:01 | TG | Thyroid | 7677 |
| FLSSGSGEV | HLA-A02:01 | TG | Thyroid | 7678 |
| GLTTELFSPV | HLA-A02:01 | TG | Thyroid | 7679 |
| KQVDQFLGV | HLA-A02:01 | TG | Thyroid | 7680 |
| SLWVEVDLLI | HLA-A02:01 | TG | Thyroid | 7681 |
| WGLLDQVAAL | HLA-A02:01 | TG | Thyroid | 7682 |
| MLPGLTTEL | HLA-A02:01 | TG | Thyroid | 7683 |
| ALVLEIFTLL | HLA-A02:01 | TG | Thyroid | 7684 |
| QNLFGGKFLV | HLA-A02:01 | TG | Thyroid | 7685 |
| SLLSYEASVPSV | HLA-A02:01 | TQ | Thyroid | 7686 |
| FLAAVGNLIV | HLA-A02:01 | TG | Thyroid | 7687 |
| SLFIQSLYEA | HLA-A02:01 | TG | Thyroid | 7688 |
| HWLFKHLFSA | HLA-A02:01 | TG | Thyroid | 7689 |
| ASLLELPEFL | HLA-A02:01 | TG | Thyroid | 7690 |
| HLMQKFEKV | HLA-A02:01 | TG | Thyroid | 7691 |
| FLASLLEL | HLA-A02:01 | TG | Thyroid | 7692 |
| KIMQYFSHFI | HLA-A02:01 | TG | Thyroid | 7693 |
| LLADVQFALG | HLA-A02:01 | TG | Thyroid | 7694 |
| MLSGLYNPIV | HLA-A02:01 | TG | Thyroid | 7695 |
| ALVLEIFTL | HLA-A02:01 | TG | Thyroid | 7696 |
| GLYNPIVPSA | HLA-A02:01 | TG | Thyroid | 7697 |
| GLREDLLSL | HLA-A02:01 | TG | Thyroid | 7698 |
| SLQDVPLAA | HLA-A02:01 | TG | Thyroid | 7699 |
| SLQDVPLAAL | HLA-A02:01 | TG | Thyroid | 7700 |
| VLNDAQTKL | HLA-A02:01 | TG | Thyroid | 7701 |
| FLVAKGIRL | HLA-A02:01 | TG | Thyroid | 7702 |
| SLYEAGQQDV | HLA-A02:01 | TG | Thyroid | 7703 |
| DLGDVMETV | HLA-A02:01 | TG | Thyroid | 7704 |
| FLREPPARA | HLA-A02:01 | TG | Thyroid | 7705 |
| VIFDANAPVAV | HLA-A02:01 | TG | Thyroid | 7706 |
| GLLSSPSVL | HLA-A02:01 | TG | Thyroid | 7707 |
| SLEEKSLSL | HLA-A02:01 | TG | Thyroid | 7708 |
| FLAAVGNLIVV | HLA-A02:01 | TG | Thyroid | 7709 |
| ELAETGLEL | HLA-A02:01 | TG | Thyroid | 7710 |
| GLLSSPSVLL | HLA-A02:01 | TG | Thyroid | 7711 |
| VLPSLTEKV | HLA-A02:01 | TG | Thyroid | 7712 |
| SLALSSVVV | HLA-A02:01 | TG | Thyroid | 7713 |
| SLWVEVDLL | HLA-A02:01 | TG | Thyroid | 7714 |
| ELPEFLLFL | HLA-A02:01 | TG | Thyroid | 7715 |
| QLAEITESA | HLA-A02:01 | TG | Thyroid | 7716 |
| GLLSSPSV | HLA-A02:01 | TG | Thyroid | 7717 |
| RLEDIPVASI | HLA-A02:01 | TG | Thyroid | 7718 |
| ELAETGLELL | HLA-A02:01 | TG | Thyroid | 7719 |
| GLINRAKAV | HLA-A02:01 | TG | Thyroid | 7720 |
| ALLSNSSML | HLA-A02:01 | TG | Thyroid | 7721 |
| QLLDQVAA | HLA-A02:01 | TG | Thyroid | 7722 |
| TLYPEAQV | HLA-A02:01 | TG | Thyroid | 7723 |
| KLMGISIRINK | HLA-A03:01 | TG | Thyroid | 7724 |
| RLYFGTSGY | HLA-A03:01 | TG | Thyroid | 7725 |
| HTYPFGWYQK | HLA-A03:01 | TG | Thyroid | 7726 |
| RLILPQMPK | HLA-A03:01 | TG | Thyroid | 7727 |
| RTSGLLSSWK | HLA-A03:01 | TG | Thyroid | 7728 |
| CLSFCQLQK | HLA-A03:01 | TG | Thyroid | 7729 |
| SLYFTCTLY | HLA-A03:01 | TG | Thyroid | 7730 |
| CRLILPQMPK | HLA-A03:01 | TG | Thyroid | 7731 |
| RLLHGVGDK | HLA-A03:01 | TG | Thyroid | 7732 |
| ACLSFCQLQK | HLA-A03:01 | TG | Thyroid | 7733 |
| SRLYFGTSGY | HLA-A03:01 | TG | Thyroid | 7734 |
| RLGVNVTWK | HLA-A03:01 | TG | Thyroid | 7735 |
| IIDMASAWAK | HLA-A03:01 | TG | Thyroid | 7736 |
| SLSSQKHWLFK | HLA-A03:01 | TG | Thyroid | 7737 |
| RLQQNLEGGK | HLA-A03:01 | TG | Thyroid | 7738 |
| AIQVGTSWK | HLA-A03:01 | TG | Thyroid | 7739 |
| VVLPSLTEK | HLA-A03:01 | TG | Thyroid | 7740 |
| SVFPPGPLIC | HLA-A03:01 | TG | Thyroid | 7741 |
| SVFPPGPLICS | HLA-A03:01 | TG | Thyroid | 7742 |
| AIFPSRGLAR | HLA-A03:01 | TG | Thyroid | 7743 |
| ATSCPPTIK | HLA-A03:01 | TG | Thyroid | 7744 |
| GLYNPIVFS | HLA-A03:01 | TG | Thyroid | 7745 |
| KLLVKIMSY | HLA-A03:01 | TG | Thyroid | 7746 |
| ILLEPYLFW | HLA-A03:01 | TG | Thyroid | 7747 |
| HTYPFGWYQK | HLA-A11:01 | TG | Thyroid | 7748 |
| STFTETTLYR | HLA-A11:01 | TG | Thyroid | 7749 |
| SSQKHWLFK | HLA-A11:01 | TG | Thyroid | 7750 |
| VVLPSLTEK | HLA-A11:01 | TG | Thyroid | 7751 |
| STLSFYQRR | HLA-A11:01 | TG | Thyroid | 7752 |
| RLILPQMPK | HLA-A11:01 | TG | Thyroid | 7753 |
| IIDMASAWAK | HLA-A11:01 | TG | Thyroid | 7754 |
| GSFQLHLDSK | HLA-A11:01 | TG | Thyroid | 7755 |
| RTSGLLSSWK | HLA-A11:01 | TG | Thyroid | 7756 |
| ATSCPPTIK | HLA-A11:01 | TG | Thyroid | 7757 |
| ATSNFSAVR | HLA-A11:01 | TG | Thyroid | 7758 |
| KLMGISIRNK | HLA-A11:01 | TG | Thyroid | 7759 |
| AFSQTHLMQK | HLA-A11:01 | TG | Thyroid | 7760 |
| VHTYPFGWYQK | HLA-A11:01 | TG | Thyroid | 7761 |
| ATNSQLFRR | HLA-A11:01 | TG | Thyroid | 7762 |
| SSQDDGLINR | HLA-A11:01 | TG | Thyroid | 7763 |
| AVQSVISGR | HLA-A11:01 | TG | Thyroid | 7764 |
| ATPWPDFVPR | HLA-A11:01 | TG | Thyroid | 7765 |
| TTLYRILQR | HLA-A11:01 | TG | Thyroid | 7766 |
| SQDDGLINR | HLA-A11:01 | TG | Thyroid | 7767 |
| SVQVGCLTR | HLA-ALI:01 | TG | Thyroid | 7768 |
| VTFSSPQRR | HLA-A11:01 | TG | Thyroid | 7769 |
| GTFNFSQFFQQ | HLA-A11:01 | TG | Thyroid | 7770 |
| RFPDAFVTF | HLA-A24:02 | TG | Thyroid | 7771 |
| ADYADLLQTF | HLA-A24:02 | TG | Thyroid | 7772 |
| SGYFSQHDLF | HLA-A24:02 | TG | Thyroid | 7773 |
| SYNRFPDAFVTF | HLA-A24:02 | TG | Thyroid | 7774 |
| GYFSQHDLF | HLA-A24:02 | TG | Thyroid | 7775 |
| SYRVGVFGF | HLA-A24:02 | TG | Thyroid | 7776 |
| RWASPRVARF | HLA-A24:02 | TG | Thyroid | 7777 |
| NRFPDAFVTF | HLA-A24:02 | TG | Thyroid | 7778 |
| DYADLLQTF | HLA-A24:02 | TG | Thyroid | 7779 |
| VYLKKGAII | HLA-A24:02 | TG | Thyroid | 7780 |
| RFPDAFVTFSSF | HLA-A24:02 | TG | Thyroid | 7781 |
| SYNREPDAF | HLA-A24:02 | TG | Thyroid | 7782 |
| FYPAYEGQP | HLA-A24:02 | TG | Thyroid | 7783 |
| IFPAETIRF | HLA-A24:02 | TG | Thyroid | 7784 |
| SADYADLLQTF | HLA-A24:02 | TG | Thyroid | 7785 |
| KFLVNVGQF | HLA-A24:02 | TG | Thyroid | 7786 |
| IYDTIFAGL | HLA-A24:02 | TG | Thyroid | 7787 |
| PYMPQCDAF | HLA-A24:02 | TG | Thyroid | 7788 |
| LYFGTSGYF | HLA-A24:02 | TG | Thyroid | 7789 |
| EFMPVQCKF | HLA-A24:02 | TG | Thyroid | 7790 |
| NYKEFSELL | HLA-A24:02 | TG | Thyroid | 7791 |
| EFSRKVPTF | HLA-A24:02 | TG | Thyroid | 7792 |
| QYPGSYSDF | HLA-A24:02 | TG | Thyroid | 7793 |
| FYTRLPPQKL | HLA-A24:02 | TG | Thyroid | 7794 |
| SSQKHWLFK | HLA-A30:01 | TG | Thyroid | 7795 |
| KSRTSGLLS | HLA-A30:01 | TG | Thyroid | 7796 |
| GTRQLGRPK | HLA-A30:01 | TG | Thyroid | 7797 |
| KVKNFYTRL | HLA-A30:01 | TG | Thyroid | 7798 |
| SGRFRCPTK | HLA-A30:01 | TG | Thyroid | 7799 |
| SSKTAFYQA | HLA-A30:01 | TG | Thyroid | 7800 |
| RSQENPSPK | HLA-A30:01 | TG | Thyroid | 7801 |
| GTRGTFNFS | HLA-A30:01 | TG | Thyroid | 7802 |
| KSRTSGLLSS | HLA-A30:01 | TG | Thyroid | 7803 |
| RARGNVFMY | HLA-A30:01 | TG | Thyroid | 7804 |
| GTRSAIGKPK | HLA-A30:01 | TG | Thyroid | 7805 |
| RARMQSLMGS | HLA-A30:01 | TG | Thyroid | 7806 |
| KSRLEDIPV | HLA-A30:01 | TG | Thyroid | 7807 |
| KSRLEDIPVA | HLA-A30:01 | TG | Thyroid | 7808 |
| GTRTSTSPG | HLA-A30:01 | TG | Thyroid | 7809 |
| ATRDYFIIC | HLA-A30:01 | TG | Thyroid | 7810 |
| RNKVPMSEK | HLA-A30:01 | TG | Thyroid | 7811 |
| KLMGISIRNK | HLA-A30:01 | TG | Thyroid | 7812 |
| AKKDGTMNK | HLA-A30:01 | TG | Thyroid | 7813 |
| WSKYISSLK | HLA-A30:01 | TG | Thyroid | 7814 |
| YQRWEAQNK | HLA-A30:01 | TG | Thyroid | 7815 |
| SQKDRGSGK | HLA-A30:01 | TG | Thyroid | 7816 |
| HTYPFGWYQK | HLA-A30:01 | TG | Thyroid | 7817 |
| CTGFGFLNV | HLA-A30:01 | TG | Thyroid | 7818 |
| YTRLPFQKL | HLA-A30:01 | TG | Thyroid | 7819 |
| NFQQVYLWK | HLA-A30:01 | TG | Thyroid | 7820 |
| MPKALFRKK | HLA-A30:01 | TG | Thyroid | 7821 |
| KVILEDKVK | HLA-A30:01 | TG | Thyroid | 7822 |
| MQYFSHFIR | HLA-A33:03 | TG | Thyroid | 7823 |
| STHGRLLGR | HLA-A33:03 | TG | Thyroid | 7824 |
| EAFAEQFLR | HLA-A33:03 | TG | Thyroid | 7825 |
| IMQYFSHFIR | HLA-A33:03 | TG | Thyroid | 7826 |
| TTLYRILQR | HLA-A33:03 | TG | Thyroid | 7827 |
| FVTFSSFQR | HLA-A33:03 | TG | Thyroid | 7828 |
| DMASAWAKR | HLA-A33:03 | TG | Thyroid | 7829 |
| STLSFYQRR | HLA-A33:03 | TG | Thyroid | 7830 |
| LLVKIMSYR | HLA-A33:03 | TG | Thyroid | 7831 |
| MIFDLVHSYNR | HLA-A33:03 | TG | Thyroid | 7832 |
| EAIRAIFPSR | HLA-A33:03 | TG | Thyroid | 7833 |
| HTYPFGWYQK | HLA-A33:03 | TG | Thyroid | 7834 |
| MAGCWAGPR | HLA-A33:03 | TG | Thyroid | 7835 |
| MMIFDLVHSYNR | HLA-A33:03 | TG | Thyroid | 7836 |
| EVYGTRQLGR | HLA-A33:03 | TG | Thyroid | 7837 |
| DANAPVAVR | HLA-A33:03 | TG | Thyroid | 7838 |
| EFSELLPNR | HLA-A33:03 | TG | Thyroid | 7839 |
| YAAPPLAER | HLA-A33:03 | TG | Thyroid | 7840 |
| SSQDDGLINR | HLA-A33:03 | TG | Thyroid | 7841 |
| AVQSVISGR | HLA-A33:03 | TG | Thyroid | 7842 |
| FILDELTAR | HLA-A33:03 | TG | Thyroid | 7843 |
| TLYRILQRR | HLA-A33:03 | TG | Thyroid | 7844 |
| STLSFYQR | HLA-A33:03 | TG | Thyroid | 7845 |
| DVASIHLLTAR | HLA-A33:03 | TG | Thyroid | 7846 |
| DKVKNFYTR | HLA-A33:03 | TG | Thyroid | 7847 |
| EVRQTQLKR | HLA-A33:03 | TG | Thyroid | 7848 |
| RPQPRENIL | HLA-B07:02 | TG | Thyroid | 7849 |
| RPLPFLTPF | HLA-B07:02 | TG | Thyroid | 7850 |
| QPRACQRPQL | HLA-B07:02 | TG | Thyroid | 7851 |
| RPASPTEAGL | HLA-B07:02 | TG | Thyroid | 7852 |
| APENYGHGSL | HLA-B07:02 | TG | Thyroid | 7853 |
| FPSRGLARLAL | HLA-B07:02 | TG | Thyroid | 7854 |
| SPRVARFAT | HLA-B07:02 | TG | Thyroid | 7855 |
| GPRPSRASC | HLA-B07:02 | TG | Thyroid | 7856 |
| RPQPRENILL | HLA-B07:02 | TG | Thyroid | 7857 |
| RPLPFLTPFSSL | HLA-B07:02 | TG | Thyroid | 7858 |
| FPSRGLARL | HLA-B07:02 | TG | Thyroid | 7859 |
| APVAVRSKV | HLA-B07:02 | TG | Thyroid | 7860 |
| VPISTHGRL | HLA-B07:02 | TG | Thyroid | 7861 |
| LPFLTPFSSL | HLA-B07:02 | TG | Thyroid | 7862 |
| YPAYEGQFSL | HLA-B07:02 | TG | Thyroid | 7863 |
| KPMSLDSWQSL | HLA-B07:02 | TG | Thyroid | 7864 |
| APNASVLVF | HLA-B07:02 | TG | Thyroid | 7865 |
| SPDDSAGASAL | HLA-B07:02 | TG | Thyroid | 7866 |
| APSFCPLVVL | HLA-B07:02 | TG | Thyroid | 7867 |
| IYRKPGISL | HLA-B07:02 | TG | Thyroid | 7868 |
| WPAIDGSFL | HLA-B07:02 | TG | Thyroid | 7869 |
| YPSLQDVPL | HLA-B07:02 | TG | Thyroid | 7870 |
| IPVASLPDL | HLA-B07:02 | TG | Thyroid | 7871 |
| SPTEAGLTTEL | HLA-B07:02 | TG | Thyroid | 7872 |
| ILQRRFLAV | HLA-B08:01 | TG | Thyroid | 7873 |
| SAMRHLYLL | HLA-B08:01 | TG | Thyroid | 7874 |
| FLRTVQAL | HLA-B08:01 | TG | Thyroid | 7875 |
| LMMQKFEKV | HLA-B08:01 | TG | Thyroid | 7876 |
| RILQRRFLAV | HLA-B08:01 | TG | Thyroid | 7877 |
| YRILQRRFLAV | HLA-B08:01 | TG | Thyroid | 7878 |
| LQRRFLAV | HLA-B08:01 | TG | Thyroid | 7879 |
| SAMRHLYL | HLA-B08:01 | TG | Thyroid | 7880 |
| KQRARMQSL | HLA-B08:01 | TG | Thyroid | 7881 |
| YQRRRFSPDDSA | HLA-B08:01 | TG | Thyroid | 7882 |
| SQLFRRAVL | HLA-B08:01 | TG | Thyroid | 7883 |
| CLRQKPANVL | HLA-B08:01 | TG | Thyroid | 7884 |
| MPKALFRKKVIL | HLA-B08:01 | TG | Thyroid | 7885 |
| HLMQKFEKV | HLA-B08:01 | TG | Thyroid | 7886 |
| QLFRRAVL | HLA-B08:01 | TG | Thyroid | 7887 |
| CLRQKPANV | HLA-B08:01 | TG | Thyroid | 7888 |
| ALFRKKVIL | HLA-B08:01 | TG | Thyroid | 7889 |
| EAKLRVLQF | HLA-B08:01 | TG | Thyroid | 7890 |
| ECQWREHSL | HLA-B08:01 | TG | Thyroid | 7891 |
| DLLGRFTDL | HLA-B08:01 | TG | Thyroid | 7892 |
| GWYQKPMSL | HLA-B08:01 | TG | Thyroid | 7893 |
| ALKFLASL | HLA-B08:01 | TG | Thyroid | 7894 |
| DAQTKLLAV | HLA-B08:01 | TG | Thyroid | 7895 |
| SLEEKSLSL | HLA-B08:01 | TG | Thyroid | 7896 |
| DPSIRHFDV | HLA-B08:01 | TG | Thyroid | 7897 |
| EACLITTL | HLA-B08:01 | TG | Thyroid | 7898 |
| YRKPGISL | HLA-B08:01 | TG | Thyroid | 7899 |
| CASERQQAL | HLA-B08:01 | TG | Thyroid | 7900 |
| GLINRAKAV | HLA-B08:01 | TG | Thyroid | 7901 |
| DLTPAKLL | HLA-B08:01 | TG | Thyroid | 7902 |
| TDMMIFDLV | HLA-B13:02 | TG | Thyroid | 7903 |
| RDYFIICPI | HLA-B13:02 | TG | Thyroid | 7904 |
| RDYFIICPII | HLA-B13:02 | TG | Thyroid | 7905 |
| LEIFTILLASI | HLA-B13:02 | TG | Thyroid | 7906 |
| CDAFGSWEPV | HLA-B13:02 | TG | Thyroid | 7907 |
| SEQAFLRTV | HLA-B13:02 | TG | Thyroid | 7908 |
| TTDMMIFDLV | HLA-B13:02 | TG | Thyroid | 7909 |
| LEPYLFWQI | HLA-B13:02 | TG | Thyroid | 7910 |
| YEASVPSVPI | HLA-B13:02 | TG | Thyroid | 7911 |
| ADLLQTFQV | HLA-B13:02 | TG | Thyroid | 7912 |
| CTEDEACSFFTV | HLA-B13:02 | TG | Thyroid | 7913 |
| FDLRNCWCV | HLA-B13:02 | TG | Thyroid | 7914 |
| LELPEFLLFL | HLA-B13:02 | TG | Thyroid | 7915 |
| VQFALGLPF | HLA-B13:02 | TG | Thyroid | 7916 |
| RDLCCDGFV | HLA-B13:02 | TG | Thyroid | 7917 |
| DEACSFFTV | HLA-B13:02 | TG | Thyroid | 7918 |
| SQYPSLQDY | HLA-B13:02 | TG | Thyroid | 7919 |
| ALTWVQTHI | HLA-B13:02 | TG | Thyroid | 7920 |
| AQCPSLCNV | HLA-B13:02 | TG | Thyroid | 7921 |
| GQYRASQKD | HLA-B13:02 | TG | Thyroid | 7922 |
| GQWRQVQCN | HLA-B13:02 | TG | Thyroid | 7923 |
| NLFGGKFLV | HLA-B13:02 | TG | Thyroid | 7924 |
| SQTHLMQKF | HLA-B13:02 | TG | Thyroid | 7925 |
| RQSRAPQAL | HLA-B13:02 | TG | Thyroid | 7926 |
| KQVDQFLGV | HLA-B13:02 | TG | Thyroid | 7927 |
| RLLGRSQAI | HLA-B13:02 | TG | Thyroid | 7928 |
| EQTPERLFV | HLA-B13:02 | TG | Thyroid | 7929 |
| GQQDVFPVL | HLA-B13:02 | TG | Thyroid | 7930 |
| VQCDVQQV | HLA-B13:02 | TG | Thyroid | 7931 |
| GQFSLEEKS | HLA-B13:02 | TG | Thyroid | 7932 |
| LAAQSTLSF | HLA-B46:01 | TG | Thyroid | 7933 |
| FMYHAPENY | HLA-B46:01 | TG | Thyroid | 7934 |
| WTSDNVACM | HLA-B46:01 | TG | Thyroid | 7935 |
| YINSTDTSY | HLA-B46:01 | TG | Thyroid | 7936 |
| FSLFIQSLY | HLA-B46:01 | TG | Thyroid | 7937 |
| FTATSFGHPY | HLA-B46:01 | TG | Thyroid | 7938 |
| MIFDLVHSY | HLA-B46:01 | TG | Thyroid | 7939 |
| LAKEVSCPM | HLA-B46:01 | TG | Thyroid | 7940 |
| LAVSGPFHY | HLA-B46:01 | TG | Thyroid | 7941 |
| FQNMLSGLY | HLA-B46:01 | TG | Thyroid | 7942 |
| AASGNFSLF | HLA-B46:01 | TG | Thyroid | 7943 |
| FAGLDLPSTF | HLA-B46:01 | TG | Thyroid | 7944 |
| VQFALGLPF | HLA-B46:01 | TG | Thyroid | 7945 |
| YLLCPFPPM | HLA-B46:01 | TG | Thyroid | 7946 |
| LAAQSTLSFY | HLA-B46:01 | TG | Thyroid | 7947 |
| FGFLNVSQL | HLA-B46:01 | TG | Thyroid | 7948 |
| HSTDDYASF | HLA-B46:01 | TG | Thyroid | 7949 |
| RSKVPDSEF | HLA-B46:01 | TG | Thyroid | 7950 |
| SSRFPLGESF | HLA-B46:01 | TG | Thyroid | 7951 |
| NLIVVTASY | HLA-B46:01 | TG | Thyroid | 7952 |
| PLFPPREAF | HLA-B46:01 | TG | Thyroid | 7953 |
| AARAPGACF | HLA-B46:01 | TG | Thyroid | 7954 |
| VSLDSWQSL | HLA-B46:01 | TG | Thyroid | 7955 |
| RLYFGTSGY | HLA-B46:01 | TG | Thyroid | 7956 |
| SRFPLGESF | HLA-B46:01 | TG | Thyroid | 7957 |
| NATCPGVTY | HLA-B46:01 | TG | Thyroid | 7958 |
| KLLVKIMSY | HLA-B46:01 | TG | Thyroid | 7959 |
| QAIPGTRSA | HLA-B46:01 | TG | Thyroid | 7960 |
| ILRLGDQEF | HLA-B46:01 | TG | Thyroid | 7961 |
| MLPGLTTEL | HLA-C01:02 | TG | Thyroid | 7962 |
| FTNFQQVYL | HLA-C01:02 | TG | Thyroid | 7963 |
| ILPQMPKAL | HLA-C01:02 | TG | Thyroid | 7964 |
| SAMRHLYLL | HLA-C01:02 | TG | Thyroid | 7965 |
| LLSSPSVLL | HLA-C01:02 | TG | Thyroid | 7966 |
| LLADVQFAL | HLA-C01:02 | TG | Thyroid | 7967 |
| ASLYFTCTL | HLA-C01:02 | TG | Thyroid | 7968 |
| SLEEKSLSL | HLA-C01:02 | TG | Thyroid | 7969 |
| YLLCPFPPM | HLA-C01:02 | TG | Thyroid | 7970 |
| CSAMRHLYL | HLA-C01:02 | TG | Thyroid | 7971 |
| RAQQQAIAL | HLA-C01:02 | TG | Thyroid | 7972 |
| FATSCPPTI | HLA-C01:02 | TG | Thyroid | 7973 |
| FGFLNVSQL | HLA-C01:02 | TG | Thyroid | 7974 |
| FSAVRDLCL | HLA-C01:02 | TG | Thyroid | 7975 |
| AAATWYYSL | HLA-C01:02 | TG | Thyroid | 7976 |
| SCPPTIKEL | HLA-C01:02 | TG | Thyroid | 7977 |
| VAPNASVL | HLA-C01:02 | TG | Thyroid | 7978 |
| AIPGTRSAI | HLA-C01:02 | TG | Thyroid | 7979 |
| NAPSFCPL | HLA-C01:02 | TG | Thyroid | 7980 |
| NAPVAVRSK | HLA-C01:02 | TG | Thyroid | 7981 |
| SGPTGSAM | HLA-C01:02 | TG | Thyroid | 7982 |
| VDPASGEEL | HLA-C01:02 | TG | Thyroid | 7983 |
| AQPLRPCEL | HLA-C01:02 | TG | Thyroid | 7984 |
| ELPEFLLFL | HLA-C01:02 | TG | Thyroid | 7985 |
| VSPGYVPAC | HLA-C01:02 | TG | Thyroid | 7986 |
| FEPTGFQNM | HLA-C01:02 | TG | Thyroid | 7987 |
| FSPDDSAGASAL | HLA-C01:02 | TG | Thyroid | 7988 |
| FIPGSLTAR | HLA-C01:02 | TG | Thyroid | 7989 |
| FATSCPPTI | HLA-C03:04 | TG | Thyroid | 7990 |
| WSVFPPGPL | HLA-C03:04 | TG | Thyroid | 7991 |
| LAAQSTLSF | HLA-C03:04 | TG | Thyroid | 7992 |
| MSLDSWQSL | HLA-C03:04 | TG | Thyroid | 7993 |
| FGFLNVSQL | HLA-C03:04 | TG | Thyroid | 7994 |
| AATSNFSAV | HLA-C03:04 | TG | Thyroid | 7995 |
| SALSPAAVI | HLA-C03:04 | TG | Thyroid | 7996 |
| YLLCPFPPM | HLA-C03:04 | TG | Thyroid | 7997 |
| YPAYEGQFSL | HLA-C03:04 | TG | Thyroid | 7998 |
| LAKEVSCPM | HLA-C03:04 | TG | Thyroid | 7999 |
| AAATWYYSL | HLA-C03:04 | TG | Thyroid | 8000 |
| SAMRHLYLL | HLA-C03:04 | TG | Thyroid | 8001 |
| ISGPTGSAM | HLA-C03:04 | TG | Thyroid | 8002 |
| WTSDNVACM | HLA-C03:04 | TG | Thyroid | 8003 |
| AAVGNLIVV | HLA-C03:04 | TG | Thyroid | 8004 |
| CADSQGREL | HLA-C03:04 | TG | Thyroid | 8005 |
| YAAPPLAER | HLA-C03:04 | TG | Thyroid | 8006 |
| FIICPIIDM | HLA-C03:04 | TG | Thyroid | 8007 |
| FATPWPDFV | HLA-C03:04 | TG | Thyroid | 8008 |
| CASERQQAL | HLA-C03:04 | TG | Thyroid | 8009 |
| YASFSRAL | HLA-C03:04 | TG | Thyroid | 8010 |
| RAIFPSRGL | HLA-C03:04 | TG | Thyroid | 8011 |
| PAYEGQFSL | HLA-C03:04 | TG | Thyroid | 8012 |
| LAETGLEL | HLA-C03:04 | TG | Thyroid | 8013 |
| FSLFIQSL | HLA-C03:04 | TG | Thyroid | 8014 |
| FLTPFSSL | HLA-C03:04 | TG | Thyroid | 8015 |
| YADTQSCTHSL | HLA-C03:04 | TG | Thyroid | 8016 |
| FSAVRDLCL | HLA-C03:04 | TG | Thyroid | 8017 |
| FTNFQQVYL | HLA-C03:04 | TG | Thyroid | 8018 |
| IYDTIFAGL | HLA-C04:01 | TG | Thyroid | 8019 |
| RFPDAFVTF | HLA-C04:01 | TG | Thyroid | 8020 |
| SYSDESTPL | HLA-C04:01 | TG | Thyroid | 8021 |
| FYQALQNSL | HLA-C04:01 | TG | Thyroid | 8022 |
| FYQEQAGSI | HLA-C04:01 | TG | Thyroid | 8023 |
| TFPAETIRF | HLA-C04:01 | TG | Thyroid | 8024 |
| RFPLGESFL | HLA-C04:01 | TG | Thyroid | 8025 |
| SQPAGSTLF | HLA-C04:01 | TG | Thyroid | 8026 |
| GQDSPAVYL | HLA-C04:01 | TG | Thyroid | 8027 |
| YREAASGNF | HLA-C04:01 | TG | Thyroid | 8028 |
| LQDVPLAAL | HLA-C04:01 | TG | Thyroid | 8029 |
| FYPAYEGQF | HLA-C04:01 | TG | Thyroid | 8030 |
| SYNRFPDAF | HLA-C04:01 | TG | Thyroid | 8031 |
| MLPGLTTEL | HLA-C04:01 | TG | Thyroid | 8032 |
| TEDEACSFF | HLA-C04:01 | TG | Thyroid | 8033 |
| IFDANAPVAV | HLA-C04:01 | TG | Thyroid | 8034 |
| HFDVAHVST | HLA-C04:01 | TG | Thyroid | 8035 |
| VVDPSIRHF | HLA-C04:01 | TG | Thyroid | 8036 |
| IFDLVHSYN | HLA-C04:01 | TG | Thyroid | 8037 |
| IFDLVHSY | HLA-C04:01 | TG | Thyroid | 8038 |
| CVDEAGQEL | HLA-C04:01 | TG | Thyroid | 8039 |
| HFDVAHVSTA | HLA-C04:01 | TG | Thyroid | 8040 |
| SFCPLVVL | HLA-C04:01 | TG | Thyroid | 8041 |
| TYDQESHQV | HLA-C04:01 | TG | Thyroid | 8042 |
| GQDLTPAKL | HLA-C04:01 | TG | Thyroid | 8043 |
| HFDLRNCWC | HLA-C04:01 | TG | Thyroid | 8044 |
| YRKPGISLI | HLA-C07:01 | TG | Thyroid | 8045 |
| YRILQRRFL | HLA-C07:01 | TG | Thyroid | 8046 |
| RRFLAVQSV | HLA-C07:01 | TG | Thyroid | 8047 |
| TRLPFQKLM | HLA-C07:01 | TG | Thyroid | 8048 |
| YRVGVFGFL | HLA-C07:01 | TG | Thyroid | 8049 |
| SRFPLGESF | HLA-C07:01 | TG | Thyroid | 8050 |
| LREPPARAL | HLA-C07:01 | TG | Thyroid | 8051 |
| WREHSLRPL | HLA-C07:01 | TG | Thyroid | 8052 |
| RRFQAPEPL | HLA-C07:01 | TG | Thyroid | 8053 |
| CRQGSWSVF | HLA-C07:01 | TG | Thyroid | 8054 |
| LRQKPANVL | HLA-C07:01 | TG | Thyroid | 8055 |
| YTRLPFQKLM | HLA-C07:01 | TG | Thyroid | 8056 |
| YREAASGNF | HLA-C07:01 | TG | Thyroid | 8057 |
| ARATNSQLF | HLA-C07:01 | TG | Thyroid | 8058 |
| ISRFPLGESFL | HLA-C07:01 | TG | Thyroid | 8059 |
| QRARMQSLM | HLA-C07:01 | TG | Thyroid | 8060 |
| RRFPEVSGY | HLA-C07:01 | TG | Thyroid | 8061 |
| ARGNVFMY | HLA-C07:01 | TG | Thyroid | 8062 |
| RNPNYPYEF | HLA-C07:01 | TG | Thyroid | 8063 |
| CNGPPEQVF | HLA-C07:01 | TG | Thyroid | 8064 |
| SCPPTIKEL | HLA-C07:01 | TG | Thyroid | 8065 |
| GRNPNYPYEF | HLA-C07:01 | TG | Thyroid | 8066 |
| RARGNVFMY | HLA-C07:01 | TG | Thyroid | 8067 |
| RNGDYQAVQ | HLA-C07:01 | TG | Thyroid | 8068 |
| KRSLWVEVD | HLA-C07:01 | TG | Thyroid | 8069 |
| RRFPEVSG | HLA-C07:01 | TG | Thyroid | 8070 |
| TRDYFIICP | HLA-C07:01 | TG | Thyroid | 8071 |
| MIFDLVHSY | HLA-C07:01 | TG | Thyroid | 8072 |
| RRVSPGYVP | HLA-C07:01 | TG | Thyroid | 8073 |
| YRKPGISLL | HLA-C07:02 | TG | Thyroid | 8074 |
| YRILQRRFL | HLA-C07:02 | TG | Thyroid | 8075 |
| SYSDESTPL | HLA-C07:02 | TG | Thyroid | 8076 |
| FYQALQNSL | HLA-C07:02 | TG | Thyroid | 8077 |
| FYQEQAGSL | HLA-C07:02 | TG | Thyroid | 8078 |
| YRVGVFGFL | HLA-C07:02 | TG | Thyroid | 8079 |
| TRLPFQKLM | HLA-C07:02 | TG | Thyroid | 8080 |
| ARATNSQLF | HLA-C07:02 | TG | Thyroid | 8081 |
| LYFGTSGYF | HLA-C07:02 | TG | Thyroid | 8082 |
| RRFLAVQSV | HLA-C07:02 | TG | Thyroid | 8083 |
| SRFPLGESF | HLA-C07:02 | TG | Thyroid | 8084 |
| CRQGSWSVF | HLA-C07:02 | TG | Thyroid | 8085 |
| FWSKYISSL | HLA-C07:02 | TG | Thyroid | 8086 |
| RRFQAPEPL | HLA-C07:02 | TG | Thyroid | 8087 |
| SYNRFPDAF | HLA-C07:02 | TG | Thyroid | 8088 |
| FYPAYEGQF | HLA-C07:02 | TG | Thyroid | 8089 |
| GRNPNYPYEF | HLA-C07:02 | TG | Thyroid | 8090 |
| YRKPGISL | HLA-C07:02 | TG | Thyroid | 8091 |
| NRFPDAFVTF | HLA-C07:02 | TG | Thyroid | 8092 |
| ARGNVFMY | HLA-C07:02 | TG | Thyroid | 8093 |
| RRFPEVSGY | HLA-C07:02 | TG | Thyroid | 8094 |
| RNPNYPYEF | HLA-C07:02 | TG | Thyroid | 8095 |
| ARVEAAATWY | HLA-C07:02 | TG | Thyroid | 8096 |
| NYKEFSELL | HLA-C07:02 | TG | Thyroid | 8097 |
| NYGHGSLEL | HLA-C07:02 | TG | Thyroid | 8098 |
| NRFPDAFVT | HLA-C07:02 | TG | Thyroid | 8099 |
| ASEVFTSFQY | HLA-A01:01 | TGM4 | Prostate | 8100 |
| WTGDYEGGTAPY | HLA-A01:01 | TGM4 | Prostate | 8101 |
| MTHDSVWNFH | HLA-A01:01 | TGM4 | Prostate | 8102 |
| WTGSAPILQQYY | HLA-A01:01 | TGM4 | Prostate | 8103 |
| GSAPILQQYY | HLA-A01:01 | TGM4 | Prostate | 8104 |
| WTGSAPILQQY | HLA-A01:01 | TGM4 | Prostate | 8105 |
| MASEVFTSFQY | HLA-A01:01 | TGM4 | Prostate | 8106 |
| SSPNAILGKY | HLA-A01:01 | TGM4 | Prostate | 8107 |
| GSAPILQQY | HLA-A01:01 | TGM4 | Prostate | 8108 |
| LNDTGCHY | HLA-A01:01 | TGM4 | Prostate | 8109 |
| ILGSFELQLY | HLA-A01:01 | TGM4 | Prostate | 8110 |
| VLDPRTPSDHY | HLA-A01:01 | TGM4 | Prostate | 8111 |
| DTERNLTVDTY | HLA-A01:01 | TGM4 | Prostate | 8112 |
| VTSSPNAILGKY | HLA-A01:01 | TGM4 | Prostate | 8113 |
| KSEENILY | HLA-A01:01 | TGM4 | Prostate | 8114 |
| LTDVKFSLE | HLA-A01:01 | TGM4 | Prostate | 8115 |
| VMDHAFLLL | HLA-A01:01 | TGM4 | Prostate | 8116 |
| KSEENILYL | HLA-A01:01 | TGM4 | Prostate | 8117 |
| FSEVNGDRL | HLA-A01:01 | TGM4 | Prostate | 8118 |
| LTDVKFSL | HLA-A01:01 | TGM4 | Prostate | 8119 |
| ILNDTGCHYV | HLA-A02:01 | TGM4 | Prostate | 8120 |
| FQYPEFSIEL | HLA-A02:01 | TGM4 | Prostate | 8121 |
| ILGKYQLNV | HLA-A02:01 | TGM4 | Prostate | 8122 |
| LLGNSVNFTV | HLA-A02:01 | TGM4 | Prostate | 8123 |
| QVMDHAFLL | HLA-A02:01 | TGM4 | Prostate | 8124 |
| VMDHAFLLL | HLA-A02:01 | TGM4 | Prostate | 8125 |
| VLDCCISLL | HLA-A02:01 | TGM4 | Prostate | 8126 |
| ILGSFELQL | HLA-A02:01 | TGM4 | Prostate | 8127 |
| RQVMDHAFLL | HLA-A02:01 | TGM4 | Prostate | 8128 |
| WVFAGILTTV | HLA-A02:01 | TGM4 | Prostate | 8129 |
| FIVYDTRFV | HLA-A02:01 | TGM4 | Prostate | 8130 |
| MMSFEKGQGV | HLA-A02:01 | TGM4 | Prostate | 8131 |
| RLIWLVKMV | HLA-A02:01 | TGM4 | Prostate | 8132 |
| IPLTDVKFSL | HLA-A02:01 | TGM4 | Prostate | 8133 |
| VLLGNSVNFTV | HLA-A02:01 | TGM4 | Prostate | 8134 |
| YILNDIGCHYV | HLA-A02:01 | TGM4 | Prostate | 8135 |
| MMDASKELQV | HLA-A02:01 | TGM4 | Prostate | 8136 |
| KMVNGQEEL | HLA-A02:01 | TGM4 | Prostate | 8137 |
| AILGKYQLNV | HLA-A02:01 | TGM4 | Prostate | 8138 |
| AMMSFEKGQGV | HLA-A02:01 | TGM4 | Prostate | 8139 |
| TLAIPLIDV | HLA-A02:01 | TGM4 | Prostate | 8140 |
| IMASEVFTS | HLA-A02:01 | TGM4 | Prostate | 8141 |
| SLAILDDEPV | HLA-A02:01 | TGM4 | Prostate | 8142 |
| SMTHDSVWNFHV | HLA-A02:01 | TGM4 | Prostate | 8143 |
| GQCWVFAGI | HLA-A02:01 | TGM4 | Prostate | 8144 |
| QVMDHAFLLL | HLA-A02:01 | TGM4 | Prostate | 8145 |
| ILTTVLRAL | HLA-A02:01 | TGM4 | Prostate | 8146 |
| FGQCWVFAGI | HLA-A02:01 | TGM4 | Prostate | 8147 |
| DVLLGNSVNFTV | HLA-A02:01 | TGM4 | Prostate | 8148 |
| WVFAGILTT | HLA-A02:01 | TGM4 | Prostate | 8149 |
| EYILNDTGCHYV | HLA-A02:01 | TGM4 | Prostate | 8150 |
| VMDHAFLL | HLA-A02:01 | TGM4 | Prostate | 8151 |
| CIFKNTLAI | HLA-A02:01 | TGM4 | Prostate | 8152 |
| ILDDEPVIR | HLA-A02:01 | TGM4 | Prostate | 8153 |
| ILDDEPVIRG | HLA-A02:01 | TGM4 | Prostate | 8154 |
| PLTDVKFSL | HLA-A02:01 | TGM4 | Prostate | 8155 |
| AILDDEPVI | HLA-A02:01 | TGM4 | Prostate | 8156 |
| TLQNESGKEVTV | HLA-A02:01 | TGM4 | Prostate | 8157 |
| ILDDEPVI | HLA-A02:01 | TGM4 | Prostate | 8158 |
| TLQNESGKEV | HLA-A02:01 | TGM4 | Prostate | 8159 |
| VFAGILTTV | HLA-A02:01 | TGM4 | Prostate | 8160 |
| SLESLGISSL | HLA-A02:01 | TGM4 | Prostate | 8161 |
| VLLGNSVNF | HLA-A02:01 | TGM4 | Prostate | 8162 |
| ALGIPARSV | HLA-A02:01 | TGM4 | Prostate | 8163 |
| VLDPRTPSD | HLA-A02:01 | TGM4 | Prostate | 8164 |
| SIAKHTLVV | HLA-A02:01 | TGM4 | Prostate | 8165 |
| KGYDGWQAV | HLA-A02:01 | TGM4 | Prostate | 8166 |
| FLNQDNAV | HLA-A02:01 | TGM4 | Prostate | 8167 |
| SVQSDDVLL | HLA-A02:01 | TGM4 | Prostate | 8168 |
| SLQTSDHGTV | HLA-A02:01 | TGM4 | Prostate | 8169 |
| ALQNVNILG | HLA-A02:01 | TGM4 | Prostate | 8170 |
| QVSEVTLTL | HLA-A02:01 | TGM4 | Prostate | 8171 |
| YVNENGEKI | HLA-A02:01 | TGM4 | Prostate | 8172 |
| AMCAMMSFEK | HLA-A03:01 | TGM4 | Prostate | 8173 |
| KMAKLCDLNK | HLA-A03:01 | TGM4 | Prostate | 8174 |
| QLYTGKKMAK | HLA-A03:01 | TGM4 | Prostate | 8175 |
| SVNFTVILK | HLA-A03:01 | TGM4 | Prostate | 8176 |
| SLLTESSLK | HLA-A03:01 | TGM4 | Prostate | 8177 |
| ILGKYQLNVK | HLA-A03:01 | TGM4 | Prostate | 8178 |
| ISLLTESSLK | HLA-A03:01 | TGM4 | Prostate | 8179 |
| ISMETTSIGK | HLA-A03:01 | TGM4 | Prostate | 8180 |
| AWMKRPDLPK | HLA-A03:01 | TGM4 | Prostate | 8181 |
| TLAIPLTDVK | HLA-A03:01 | TGM4 | Prostate | 8182 |
| RAMCAMMSFEK | HLA-A03:01 | TGM4 | Prostate | 8183 |
| NSVNFTVILK | HLA-A03:01 | TGM4 | Prostate | 8184 |
| STGPNPSIAK | HLA-A03:01 | TGM4 | Prostate | 8185 |
| AILGKYQLNVK | HLA-A03:01 | TGM4 | Prostate | 8186 |
| KTGPKKFIVK | HLA-A03:01 | TGM4 | Prostate | 8187 |
| VTSSPNAILGK | HLA-A03:01 | TGM4 | Prostate | 8188 |
| YLLFNPWCK | HLA-A03:01 | TGM4 | Prostate | 8189 |
| ILYLLENPWCK | HLA-A03:01 | TGM4 | Prostate | 8190 |
| IIAEIVESK | HLA-A03:01 | TGM4 | Prostate | 8191 |
| VLNQPLQSY | HLA-A03:01 | TGM4 | Prostate | 8192 |
| SVNFTVILK | HLA-A11:01 | TGM4 | Prostate | 8193 |
| AMCAMMSFEK | HLA-A11:01 | TGM4 | Prostate | 8194 |
| ISMETTSIGK | HLA-A11:01 | TGM4 | Prostate | 8195 |
| NSVNFTVILK | HLA-A11:01 | TGM4 | Prostate | 8196 |
| STGPNPSIAK | HLA-ALL:01 | TGM4 | Prostate | 8197 |
| SLLTESSLK | HLA-A11:01 | TGM4 | Prostate | 8198 |
| TSSPNAILGK | HLA-A11:01 | TGM4 | Prostate | 8199 |
| HVWTDAWMK | HLA-A11:01 | TGM4 | Prostate | 8200 |
| GSFELQLYTGKK | HLA-A11:01 | TGM4 | Prostate | 8201 |
| GSFELQLYTGK | HLA-A11:01 | TGM4 | Prostate | 8202 |
| SSPNAILGK | HLA-A11:01 | TGM4 | Prostate | 8203 |
| ATLQNESGK | HLA-A11:01 | TGM4 | Prostate | 8204 |
| SVNFTVILKR | HLA-A11:01 | TGM4 | Prostate | 8205 |
| VTSSPNAILGK | HLA-A11:01 | TGM4 | Prostate | 8206 |
| KTGPKKFIVK | HLA-A11:01 | TGM4 | Prostate | 8207 |
| VNFTVILKR | HLA-A11:01 | TGM4 | Prostate | 8208 |
| QTSSPVFRR | HLA-A11:01 | TGM4 | Prostate | 8209 |
| SYHQLKLEF | HLA-A24:02 | TGM4 | Prostate | 8210 |
| TYINSLAIL | HLA-A24:02 | TGM4 | Prostate | 8211 |
| VFTSFQYPEF | HLA-A24:02 | TGM4 | Prostate | 8212 |
| IFIVYDTRF | HLA-A24:02 | TGM4 | Prostate | 8213 |
| YYNTKQAVCF | HLA-A24:02 | TGM4 | Prostate | 8214 |
| IMASEVFTSF | HLA-A24:02 | TGM4 | Prostate | 8215 |
| RAMCAMMSF | HLA-A24:02 | TGM4 | Prostate | 8216 |
| QYPEFSIEL | HLA-A24:02 | TGM4 | Prostate | 8217 |
| KTYINSLAIL | HLA-A24:02 | TGM4 | Prostate | 8218 |
| VYDTRFVF | HLA-A24:02 | TGM4 | Prostate | 8219 |
| QSYHQLKLEF | HLA-A24:02 | TGM4 | Prostate | 8220 |
| EFQTSSPVF | HLA-A24:02 | TGM4 | Prostate | 8221 |
| VLLGNSVNF | HLA-A24:02 | TGM4 | Prostate | 8222 |
| IFIVYDTRFVF | HLA-A24:02 | TGM4 | Prostate | 8223 |
| IVYDTRFVF | HLA-A24:02 | TGM4 | Prostate | 8224 |
| KTYINSLAI | HLA-A30:01 | TGM4 | Prostate | 8225 |
| AQKIVLITK | HLA-A30:01 | TGM4 | Prostate | 8226 |
| KFIVKLSSK | HLA-A30:01 | TGM4 | Prostate | 8227 |
| MAKLCDLNK | HLA-A30:01 | TGM4 | Prostate | 8228 |
| RAMCAMMSFEK | HLA-A30:01 | TGM4 | Prostate | 8229 |
| KQVKEINAQK | HLA-A30:01 | TGM4 | Prostate | 8230 |
| AIRKGDIFI | HLA-A30:01 | TGM4 | Prostate | 8231 |
| KTGPKKFIVK | HLA-A30:01 | TGM4 | Prostate | 8232 |
| VLRALGIPA | HLA-A30:01 | TGM4 | Prostate | 8233 |
| RPVKENFLHM | HLA-A30:01 | TGM4 | Prostate | 8234 |
| SVNFTVILK | HLA-A30:01 | TGM4 | Prostate | 8235 |
| KMAKLCDLNK | HLA-A30:01 | TGM4 | Prostate | 8236 |
| QVKEINAQK | HLA-A30:01 | TGM4 | Prostate | 8237 |
| RRRDITYEYK | HLA-A30:01 | TGM4 | Prostate | 8238 |
| RRRDITYEY | HLA-A30:01 | TGM4 | Prostate | 8239 |
| RLIWLVKMV | HLA-A30:01 | TGM4 | Prostate | 8240 |
| RKGDIFIVY | HLA-A30:01 | TGM4 | Prostate | 8241 |
| DTRFVFSEV | HLA-A30:01 | TGM4 | Prostate | 8242 |
| NVKTGNHILK | HLA-A30:01 | TGM4 | Prostate | 8243 |
| GDRLIWLVK | HLA-A30:01 | TGM4 | Prostate | 8244 |
| HTLVVLDPR | HLA-A33:03 | TGM4 | Prostate | 8245 |
| HVWTDAWMKR | HLA-A33:03 | TGM4 | Prostate | 8246 |
| HAFLLLSSER | HLA-A33:03 | TGM4 | Prostate | 8247 |
| EFQTSSPVFR | HLA-A33:03 | TGM4 | Prostate | 8248 |
| QTSSPVFRR | HLA-A33:03 | TGM4 | Prostate | 8249 |
| DIFIVYDTR | HLA-A33:03 | TGM4 | Prostate | 8250 |
| SVNFTVILKR | HLA-A33:03 | TGM4 | Prostate | 8251 |
| FQTSSPVFRR | HLA-A33:03 | TGM4 | Prostate | 8252 |
| MVFMPDEDER | HLA-A33:03 | TGM4 | Prostate | 8253 |
| NFHVWTDAWMKR | HLA-A33:03 | TGM4 | Prostate | 8254 |
| STKAVGQDR | HLA-A33:03 | TGM4 | Prostate | 8255 |
| AFLLLSSER | HLA-A33:03 | TGM4 | Prostate | 8256 |
| EFQTSSPVFRR | HLA-A33:03 | TGM4 | Prostate | 8257 |
| ESSLKPTDR | HLA-A33:03 | TGM4 | Prostate | 8258 |
| EVFTSFQYP | HLA-A33:03 | TGM4 | Prostate | 8259 |
| SIELPNTGR | HLA-A33:03 | TGM4 | Prostate | 8260 |
| EFSIELPNTGR | HLA-A33:03 | TGM4 | Prostate | 8261 |
| VNFTVILKR | HLA-A33:03 | TGM4 | Prostate | 8262 |
| SPVFRRGQV | HLA-B07:02 | TGM4 | Prostate | 8263 |
| RDPVLVCRAM | HLA-B07:02 | TGM4 | Prostate | 8264 |
| SPVFRRGQVF | HLA-B07:02 | TGM4 | Prostate | 8265 |
| LPNTGRIGQL | HLA-B07:02 | TGM4 | Prostate | 8266 |
| KPTDRRDPV | HLA-B07:02 | TGM4 | Prostate | 8267 |
| KPTDRRDPVI | HLA-B07:02 | TGM4 | Prostate | 8268 |
| APYKWTGSA | HLA-B07:02 | TGM4 | Prostate | 8269 |
| NPSIAKHTL | HLA-B07:02 | TGM4 | Prostate | 8270 |
| RPVKENFLHM | HLA-B07:02 | TGM4 | Prostate | 8271 |
| PARSVTGF | HLA-B07:02 | TGM4 | Prostate | 8272 |
| APYKWTGSAPI | HLA-B07:02 | TGM4 | Prostate | 8273 |
| FPQCHPGQV | HLA-B07:02 | TGM4 | Prostate | 8274 |
| QPLQSYHQL | HLA-B07:02 | TGM4 | Prostate | 8275 |
| GPKKFIVKL | HLA-B07:02 | TGM4 | Prostate | 8276 |
| GPSPLTAI | HLA-B07:02 | TGM4 | Prostate | 8277 |
| YPEFSIEL | HLA-B07:02 | TGM4 | Prostate | 8278 |
| ILKRKTAAL | HLA-B08:01 | TGM4 | Prostate | 8279 |
| FTVILKRKTAAL | HLA-B08:01 | TGM4 | Prostate | 8280 |
| VILKRKTAAL | HLA-B08:01 | TGM4 | Prostate | 8281 |
| LKRKTAAL | HLA-B08:01 | TGM4 | Prostate | 8282 |
| TVILKRKTAAL | HLA-B08:01 | TGM4 | Prostate | 8283 |
| ILKRKTAALQ | HLA-B08:01 | TGM4 | Prostate | 8284 |
| VILKRKTAA | HLA-B08:01 | TGM4 | Prostate | 8285 |
| ILKRKTAA | HLA-B08:01 | TGM4 | Prostate | 8286 |
| ILKRKTAALQNV | HLA-B08:01 | TGM4 | Prostate | 8287 |
| HLRLVLNQPL | HLA-B08:01 | TGM4 | Prostate | 8288 |
| SIKCKPWNF | HLA-B08:01 | TGM4 | Prostate | 8289 |
| EINAQKIVL | HLA-B08:01 | TGM4 | Prostate | 8290 |
| NPSIAKHTL | HLA-B08:01 | TGM4 | Prostate | 8291 |
| NCIFKNTL | HLA-B08:01 | TGM4 | Prostate | 8292 |
| DSKTYINSL | HLA-B08:01 | TGM4 | Prostate | 8293 |
| NAILGKYQL | HLA-B08:01 | TGM4 | Prostate | 8294 |
| DVKFSLESL | HLA-B08:01 | TGM4 | Prostate | 8295 |
| AILGKYQL | HLA-B08:01 | TGM4 | Prostate | 8296 |
| PLTDVKFSL | HLA-B08:01 | TGM4 | Prostate | 8297 |
| GPKKFIVKL | HLA-B08:01 | TGM4 | Prostate | 8298 |
| WEFQTSSPV | HLA-B13:02 | TGM4 | Prostate | 8299 |
| KENFLHMSV | HLA-B13:02 | TGM4 | Prostate | 8300 |
| RQVMDHAFLL | HLA-B13:02 | TGM4 | Prostate | 8301 |
| LEFSTGPNPSI | HLA-B13:02 | TGM4 | Prostate | 8302 |
| YDTRFVFSEV | HLA-B13:02 | TGM4 | Prostate | 8303 |
| WEFQTSSPVF | HLA-B13:02 | TGM4 | Prostate | 8304 |
| IDFLNQDNAV | HLA-B13:02 | TGM4 | Prostate | 8305 |
| RGFIIAEIV | HLA-B13:02 | TGM4 | Prostate | 8306 |
| KTYINSLAI | HLA-B13:02 | TGM4 | Prostate | 8307 |
| GQCWVFAGI | HLA-B13:02 | TGM4 | Prostate | 8308 |
| SEVNGDRLIWLV | HLA-B13:02 | TGM4 | Prostate | 8309 |
| RLIWLVKMV | HLA-B13:02 | TGM4 | Prostate | 8310 |
| GQLLVCNCI | HLA-B13:02 | TGM4 | Prostate | 8311 |
| GQVFHLRLV | HLA-B13:02 | TGM4 | Prostate | 8312 |
| KGYDGWQAV | HLA-B13:02 | TGM4 | Prostate | 8313 |
| KEINAQKI | HLA-B13:02 | TGM4 | Prostate | 8314 |
| GQEELHVI | HLA-B13:02 | TGM4 | Prostate | 8315 |
| FQYPEFSI | HLA-B13:02 | TGM4 | Prostate | 8316 |
| SIAKHTLVV | HLA-B13:02 | TGM4 | Prostate | 8317 |
| LQSYHQLKL | HLA-B13:02 | TGM4 | Prostate | 8318 |
| MASEVFTSF | HLA-B46:01 | TGM4 | Prostate | 8319 |
| RAMCAMMSF | HLA-B46:01 | TGM4 | Prostate | 8320 |
| IVYDTRFVF | HLA-B46:01 | TGM4 | Prostate | 8321 |
| FIVYDTRFVF | HLA-B46:01 | TGM4 | Prostate | 8322 |
| FAGILTTVL | HLA-B46:01 | TGM4 | Prostate | 8323 |
| FTSFQYPEF | HLA-B46:01 | TGM4 | Prostate | 8324 |
| CRAMCAMMSF | HLA-B46:01 | TGM4 | Prostate | 8325 |
| KTYINSLAI | HLA-B46:01 | TGM4 | Prostate | 8326 |
| YVNENGEKI | HLA-B46:01 | TGM4 | Prostate | 8327 |
| GSAPILQQY | HLA-B46:01 | TGM4 | Prostate | 8328 |
| MASEVFTSF | HLA-B46:01 | TGM4 | Prostate | 8329 |
| LAIPLTDVKF | HLA-B46:01 | TGM4 | Prostate | 8330 |
| VLNQPLQSY | HLA-B46:01 | TGM4 | Prostate | 8331 |
| ILNDIGCHY | HLA-B46:01 | TGM4 | Prostate | 8332 |
| RRRDITYEY | HLA-B46:01 | TGM4 | Prostate | 8333 |
| VSHHTWEF | HLA-B46:01 | TGM4 | Prostate | 8334 |
| SIKCKPWNF | HLA-B46:01 | TGM4 | Prostate | 8335 |
| KGYDGWQAV | HLA-B46:01 | TGM4 | Prostate | 8336 |
| AVSHHTWEF | HLA-B46:01 | TGM4 | Prostate | 8337 |
| SAHDTERNL | HLA-B46:01 | TGM4 | Prostate | 8338 |
| NAVSHHTWEP | HLA-B46:01 | TGM4 | Prostate | 8339 |
| VMDHAFLLL | HLA-C01:02 | TGM4 | Prostate | 8340 |
| VLDCCISLL | HLA-C01:02 | TGM4 | Prostate | 8341 |
| KTYINSLAI | HLA-C01:02 | TGM4 | Prostate | 8342 |
| MASEVFTSP | HLA-C01:02 | TGM4 | Prostate | 8343 |
| FAGILTTVL | HLA-C01:02 | TGM4 | Prostate | 8344 |
| RAMCAMMSF | HLA-C01:02 | TGM4 | Prostate | 8345 |
| VTSSPNAIL | HLA-C01:02 | TGM4 | Prostate | 8346 |
| CGPSPLTAI | HLA-C01:02 | TGM4 | Prostate | 8347 |
| IVYDTRFVF | HLA-C01:02 | TGM4 | Prostate | 8348 |
| KSEENILYL | HLA-C01:02 | TGM4 | Prostate | 8349 |
| CIFKNTLAI | HLA-C01:02 | TGM4 | Prostate | 8350 |
| ESTGPNPSI | HLA-C01:02 | TGM4 | Prostate | 8351 |
| QYPEFSIEL | HLA-C01:02 | TGM4 | Prostate | 8352 |
| SAHDTERNL | HLA-C01:02 | TGM4 | Prostate | 8353 |
| ILTTVLRAL | HLA-C01:02 | TGM4 | Prostate | 8354 |
| FCCGPSPL | HLA-C01:02 | TGM4 | Prostate | 8355 |
| RRPVKENFL | HLA-C01:02 | TGM4 | Prostate | 8356 |
| SSPVFRRGQ | HLA-C01:02 | TGM4 | Prostate | 8357 |
| SSPVFRRGQV | HLA-C01:02 | TGM4 | Prostate | 8358 |
| ILKRKTAAL | HLA-C01:02 | TGM4 | Prostate | 8359 |
| VFCCGPSPL | HLA-C01:02 | TGM4 | Prostate | 8360 |
| MASEVFTSF | HLA-C03:04 | TGM4 | Prostate | 8361 |
| FAGILTTVL | HLA-C03:04 | TGM4 | Prostate | 8362 |
| RAMCAMMSF | HLA-C03:04 | TGM4 | Prostate | 8363 |
| FSTGPNPSI | HLA-C03:04 | TGM4 | Prostate | 8364 |
| AALQNVNIL | HLA-C03:04 | TGM4 | Prostate | 8365 |
| MSVQSDDVL | HLA-C03:04 | TGM4 | Prostate | 8366 |
| IVYDTRFVF | HLA-C03:04 | TGM4 | Prostate | 8367 |
| KTYINSLAI | HLA-C03:04 | TGM4 | Prostate | 8368 |
| IAKHTLVVL | HLA-C03:04 | TGM4 | Prostate | 8369 |
| ISLLTESSL | HLA-C03:04 | TGM4 | Prostate | 8370 |
| MSFEKGQGV | HLA-C03:04 | TGM4 | Prostate | 8371 |
| FQYPEFSIEL | HLA-C03:04 | TGM4 | Prostate | 8372 |
| SAHDTERNL | HLA-C03:04 | TGM4 | Prostate | 8373 |
| QVSEVTLTL | HLA-C03:04 | TGM4 | Prostate | 8374 |
| NAILGKYQL | HLA-C03:04 | TGM4 | Prostate | 8375 |
| KSEENILYL | HLA-C03:04 | TGM4 | Prostate | 8376 |
| VSEVTLTL | HLA-C03:04 | TGM4 | Prostate | 8377 |
| VMDHAFLLL | HLA-C04:01 | TGM4 | Prostate | 8378 |
| VLDCCISLL | HLA-C04:01 | TGM4 | Prostate | 8379 |
| QYPEFSIEL | HLA-C04:01 | TGM4 | Prostate | 8380 |
| RAMCAMMSF | HLA-C04:01 | TGM4 | Prostate | 8381 |
| SFEKGQGVL | HLA-C04:01 | TGM4 | Prostate | 8382 |
| FQYPEFSIEL | HLA-C04:01 | TGM4 | Prostate | 8383 |
| WEFQTSSPVF | HLA-C04:01 | TGM4 | Prostate | 8384 |
| MASEVFTSF | HLA-C04:01 | TGM4 | Prostate | 8385 |
| FSEVNGDRL | HLA-C04:01 | TGM4 | Prostate | 8386 |
| FHVWTDAWM | HLA-C04:01 | TGM4 | Prostate | 8387 |
| EFQTSSPVF | HLA-C04:01 | TGM4 | Prostate | 8388 |
| VYDTRFVFS | HLA-C04:01 | TGM4 | Prostate | 8389 |
| VYDTRFVF | HLA-C04:01 | TGM4 | Prostate | 8390 |
| YYNTKQAVCF | HLA-C04:01 | TGM4 | Prostate | 8391 |
| IFIVYDTRF | HLA-C04:01 | TGM4 | Prostate | 8392 |
| VMDHAFLL | HLA-C04:01 | TGM4 | Prostate | 8393 |
| VFCCGPSPL | HLA-C04:01 | TGM4 | Prostate | 8394 |
| VLDCCISL | HLA-C04:01 | TGM4 | Prostate | 8395 |
| HYNWQATL | HLA-C04:01 | TGM4 | Prostate | 8396 |
| FRRGQVFHL | HLA-C07:01 | TGM4 | Prostate | 8397 |
| RRRDITYEY | HLA-C07:01 | TGM4 | Prostate | 8398 |
| MSFEKGQGV | HLA-C07:01 | TGM4 | Prostate | 8399 |
| HYVGAARSI | HLA-C07:01 | TGM4 | Prostate | 8400 |
| HRRPVKENF | HLA-C07:01 | TGM4 | Prostate | 8401 |
| QVMDHAFLL | HLA-C07:01 | TGM4 | Prostate | 8402 |
| DHYNWQATL | HLA-C07:01 | TGM4 | Prostate | 8403 |
| IRKGDIFIV | HLA-C07:01 | TGM4 | Prostate | 8404 |
| CRAMCAMMSF | HLA-C07:01 | TGM4 | Prostate | 8405 |
| FHVWTDAWM | HLA-C07:01 | TGM4 | Prostate | 8406 |
| KTYINSLAI | HLA-C07:01 | TGM4 | Prostate | 8407 |
| FRRGQVFHLRL | HLA-C07:01 | TGM4 | Prostate | 8408 |
| RRGQVFHL | HLA-C07:01 | TGM4 | Prostate | 8409 |
| RRDPVLVC | HLA-C07:01 | TGM4 | Prostate | 8410 |
| RRDITYEY | HLA-C07:01 | TGM4 | Prostate | 8411 |
| RKGDIFIVY | HLA-C07:01 | TGM4 | Prostate | 8412 |
| KSEENILYL | HLA-C07:01 | TGM4 | Prostate | 8413 |
| RRGQVFHLR | HLA-C07:01 | TGM4 | Prostate | 8414 |
| RRGQVFHLRL | HLA-C07:01 | TGM4 | Prostate | 8415 |
| ERKEYILND | HLA-C07:01 | TGM4 | Prostate | 8416 |
| DRRDPVLVC | HLA-C07:01 | TGM4 | Prostate | 8417 |
| FRRGQVFHL | HLA-C07:02 | TGM4 | Prostate | 8418 |
| SYHQLKLEF | HLA-C07:02 | TGM4 | Prostate | 8419 |
| RRRDITYEY | HLA-C07:02 | TGM4 | Prostate | 8420 |
| TYINSLAIL | HLA-C07:02 | TGM4 | Prostate | 8421 |
| QYPEFSIEL | HLA-C07:02 | TGM4 | Prostate | 8422 |
| HYVGAARSI | HLA-C07:02 | TGM4 | Prostate | 8423 |
| RRPVKENFL | HLA-C07:02 | TGM4 | Prostate | 8424 |
| FQYPEFSIEL | HLA-C07:02 | TGM4 | Prostate | 8425 |
| FHVWTDAWM | HLA-C07:02 | TGM4 | Prostate | 8426 |
| DHYNWQATL | HLA-C07:02 | TGM4 | Prostate | 8427 |
| HRRPVKENF | HLA-C07:02 | TGM4 | Prostate | 8428 |
| KRPDLPKGY | HLA-C07:02 | TGM4 | Prostate | 8429 |
| RKGDIFIVY | HLA-C07:02 | TGM4 | Prostate | 8430 |
| IRKGDIFIVY | HLA-C07:02 | TGM4 | Prostate | 8431 |
| FKNTLAIPL | HLA-C07:02 | TGM4 | Prostate | 8432 |
| AKHTLVVL | HLA-C07:02 | TGM4 | Prostate | 8433 |
| RRGQVFHL | HLA-C07:02 | TGM4 | Prostate | 8434 |
| RGDDANRNY | HLA-A01:01 | TNP1 | Testis | 8435 |
| KRGDDANRNY | HLA-A01:01 | TNP1 | Testis | 8436 |
| SRKRGDDANRNY | HLA-A01:01 | TNP | Testis | 8437 |
| GDDANRNY | HLA-A01:01 | TNP | Testis | 8438 |
| MSTSRKLKS | HLA-A01:01 | TNP1 | Testis | 8439 |
| KLKSHGMRR | HLA-A02:01 | TNP1 | Testis | 8440 |
| KSRSPHKGV | HLA-A02:01 | TNP1 | Testis | 8441 |
| KLKSHGMRRS | HLA-A02:01 | TNP1 | Testis | 8442 |
| RKLKSHGMRR | HLA-A02:01 | TNP1 | Testis | 8443 |
| STSRKLKSHGM | HLA-A02:01 | TNP1 | Testis | 8444 |
| SKSRSPHKGV | HLA-A02:01 | TNP1 | Testis | 8445 |
| MSTSRKLKSHGM | HLA-A02:01 | TNP1 | Testis | 8446 |
| RKYRKGNLK | HLA-A02:01 | TNP1 | Testis | 8447 |
| KSHGMRRSK | HLA-A02:01 | TNP1 | Testis | 8448 |
| KSRSPHKGVK | HLA-A02:01 | TNP1 | Testis | 8449 |
| RGDDANRNY | HLA-A02:01 | TNP1 | Testis | 8450 |
| SRSPHKGV | HLA-A02:01 | TNP1 | Testis | 8451 |
| KRGDDANRN | HLA-A02:01 | TNP1 | Testis | 8452 |
| NLKSRKRGD | HLA-A02:01 | TNP1 | Testis | 8453 |
| ANRNYRSHL | HLA-A02:01 | TNP1 | Testis | 8454 |
| KLKSHGMRRSK | HLA-A03:01 | TNP1 | Testis | 8455 |
| KLKSHGMRR | HLA-A03:01 | TNP1 | Testis | 8456 |
| RSKSRSPHK | HLA-A03:01 | TNP1 | Testis | 8457 |
| RKYRKGNLK | HLA-A03:01 | TNP1 | Testis | 8458 |
| RSPHKGVKR | HLA-A03:01 | TNP1 | Testis | 8459 |
| RSKSRSPHK | HLA-A11:01 | TNP1 | Testis | 8460 |
| KSHGMRRSK | HLA-A11:01 | TNP1 | Testis | 8461 |
| KSRSPHKGVK | HLA-A11:01 | TNP1 | Testis | 8462 |
| GSKRKYRKGNLK | HLA-A11:01 | TNP1 | Testis | 8463 |
| RSPHKGVKR | HLA-A11:01 | TNP1 | Testis | 8464 |
| RKYRKGNLK | HLA-A11:01 | TNP1 | Testis | 8465 |
| STSRKLKSH | HLA-A11:01 | TNP1 | Testis | 8466 |
| KYRKGNLKS | HLA-A24:02 | TNP1 | Testis | 8467 |
| KYRKGNLKSR | HLA-A24:02 | TNP1 | Testis | 8468 |
| KYRKGNLK | HLA-A24:02 | TNP1 | Testis | 8469 |
| RSKSRSPHK | HLA-A30:01 | TNP1 | Testis | 8470 |
| KSHGMRRSK | HLA-A30:01 | TNP1 | Testis | 8471 |
| KSRSPHKGV | HLA-A30:01 | TNP1 | Testis | 8472 |
| HGMRRSKSR | HLA-A33:03 | TNP1 | Testis | 8473 |
| KLKSHGMRR | HLA-A33:03 | TNP1 | Testis | 8474 |
| GVKRGGSKR | HLA-A33:03 | TNP1 | Testis | 8475 |
| YRKGNLKSR | HLA-A33:03 | TNP1 | Testis | 8476 |
| KYRKGNLKSR | HLA-A33:03 | TNP1 | Testis | 8477 |
| KSRSPHKGV | HLA-B07:02 | TNP1 | Testis | 8478 |
| SPHKGVKRG | HLA-B07:02 | TNP1 | Testis | 8479 |
| TSRKLKSHGM | HLA-B07:02 | TNP1 | Testis | 8480 |
| ANRNYRSHL | HLA-B07:02 | TNP1 | Testis | 8481 |
| SPHKGVKR | HLA-B07:02 | TNP1 | Testis | 8482 |
| SRKLKSHGM | HLA-B08:01 | TNP1 | Testis | 8483 |
| SKRKYRKGNL | HLA-B08:01 | TNP1 | Testis | 8484 |
| TSRKLKSHGM | HLA-B08:01 | TNP1 | Testis | 8485 |
| NLKSRKRGD | HLA-B08:01 | TNP1 | Testis | 8486 |
| KRKYRKGNL | HLA-B08:01 | TNP1 | Testis | 8487 |
| TSRKLKSH | HLA-B08:01 | TNP1 | Testis | 8488 |
| KSRSPHKGV | HLA-B13:02 | TNP1 | Testis | 8489 |
| SKSRSPHKGV | HLA-B13:02 | TNP1 | Testis | 8490 |
| ANRNYRSHL | HLA-B13:02 | TNP1 | Testis | 8491 |
| RSPHKGVKR | HLA-B13:02 | TNP1 | Testis | 8492 |
| GVKRGGSKR | HLA-B13:02 | TNP1 | Testis | 8493 |
| RKYRKQNLKS | HLA-B13:02 | TNP1 | Testis | 8494 |
| KSHGMRRSK | HLA-B46:01 | TNP1 | Testis | 8495 |
| KSRSPHKGV | HLA-B46:01 | TNP1 | Testis | 8496 |
| RGDDANRNY | HLA-B46:01 | TNP1 | Testis | 8497 |
| TSRKLKSH | HLA-B46:01 | TNP1 | Testis | 8498 |
| ANRNYRSH | HLA-B46:01 | TNP1 | Testis | 8499 |
| DANRNYRSH | HLA-B46:01 | TNP1 | Testis | 8500 |
| KSRSPHKGV | HLA-C01:02 | TNP1 | Testis | 8501 |
| ANRNYRSHL | HLA-C01:02 | TNP1 | Testis | 8502 |
| MSTSRKLKSHGM | HLA-C01:02 | TNP1 | Testis | 8503 |
| RSPHKGVKR | HLA-C01:02 | TNP1 | Testis | 8504 |
| RSPHKGVK | HLA-C01:02 | TNP1 | Testis | 8505 |
| KSHGMRRSK | HLA-C01:02 | TNP1 | Testis | 8506 |
| KSRSPHKGV | HLA-C03:04 | TNP1 | Testis | 8507 |
| MSTSRKLKSHGM | HLA-C03:04 | TNP1 | Testis | 8508 |
| RGDDANRNY | HLA-C03:04 | TNP1 | Testis | 8509 |
| DANRNYRSHL | HLA-C03:04 | TNP1 | Testis | 8510 |
| DANRNYRSH | HLA-C03:04 | TNP1 | Testis | 8511 |
| ANRNYRSHL | HLA-C03:04 | TNP1 | Testis | 8512 |
| KLKSHGMRR | HLA-C04:01 | TNP1 | Testis | 8513 |
| KSRSPHKGV | HLA-C04:01 | TNP1 | Testis | 8514 |
| RGDDANRNY | HLA-C04:01 | TNP1 | Testis | 8515 |
| RGDDANRN | HLA-C04:01 | TNP1 | Testis | 8516 |
| NRNYRSHL | HLA-C04:01 | TNP1 | Testis | 8517 |
| SRKLKSHGM | HLA-C07:01 | TNP1 | Testis | 8518 |
| KRKYRKGNL | HLA-C07:01 | TNP1 | Testis | 8519 |
| YRKGNLKSR | HLA-C07:01 | TNP1 | Testis | 8520 |
| KRGGSKRKY | HLA-C07:01 | TNP1 | Testis | 8521 |
| KRGDDANRNY | HLA-C07:01 | TNP1 | Testis | 8522 |
| RRSKSRSP | HLA-C07:01 | TNP1 | Testis | 8523 |
| SRKLKSHGM | HLA-C07:02 | TNP1 | Testis | 8524 |
| KRKYRKGNL | HLA-C07:02 | TNP1 | Testis | 8525 |
| YRKGNLKSR | HLA-C07:02 | TNP1 | Testis | 8526 |
| KRGGSKRKY | HLA-C07:02 | TNP1 | Testis | 8527 |
| NRNYRSHL | HLA-C07:02 | TNP1 | Testis | 8528 |
| SRSPHKGVK | HLA-C07:02 | TNP1 | Testis | 8529 |
| WLDVQVSNTY | HLA-A01:01 | TPD52L3 | Testis | 8530 |
| RTETSVGTY | HLA-A01:01 | TPD52L3 | Testis | 8531 |
| ARTETSVGTY | HLA-A01:01 | TPD52L3 | Testis | 8532 |
| LTEPEQREL | HLA-A01:01 | TPD52L3 | Testis | 8533 |
| KLGLTALVGL | HLA-A02:01 | TPD52L3 | Testis | 8534 |
| KLEAEIVTL | HLA-A02:01 | TPD52L3 | Testis | 8535 |
| GLMGTIKSKV | HLA-A02:01 | TPD52L3 | Testis | 8536 |
| KLTKLEAEI | HLA-A02:01 | TPD52L3 | Testis | 8537 |
| ALSTMGTLI | HLA-A02:01 | TPD52L3 | Testis | 8538 |
| GLIFNKYTL | HLA-A02:01 | TPD52L3 | Testis | 8539 |
| TLICRKLGGV | HLA-A02:01 | TPD52L3 | Testis | 8540 |
| RSFEGLMGTI | HLA-A02:01 | TPD52L3 | Testis | 8541 |
| KLGLTALV | HLA-A02:01 | TPD52L3 | Testis | 8542 |
| ALVGLRQNL | HLA-A02:01 | TPD52L3 | Testis | 8543 |
| KLGGVKKSA | HLA-A02:01 | TPD52L3 | Testis | 8544 |
| GLTALVGL | HLA-A02:01 | TPD52L3 | Testis | 8545 |
| TKLEAEIVTL | HLA-A02:01 | TPD52L3 | Testis | 8546 |
| RSFEGLIFNK | HLA-A03:01 | TPD52L3 | Testis | 8547 |
| STMGTLICRK | HLA-A03:01 | TPD52L3 | Testis | 8548 |
| VTLRHVLAAK | HLA-A03:01 | TPD52L3 | Testis | 8549 |
| GLMGTIKSK | HLA-A03:01 | TPD52L3 | Testis | 8550 |
| RSFEGLMGTIK | HLA-A03:01 | TPD52L3 | Testis | 8551 |
| STMGTLICRK | HLA-A11:01 | TPD52L3 | Testis | 8552 |
| RSFEGLIFNK | HLA-A11:01 | TPD52L3 | Testis | 8553 |
| STMGTLICR | HLA-A11:01 | TPD52L3 | Testis | 8554 |
| TFRSFEGLIF | HLA-A24:02 | TPD52L3 | Testis | 8555 |
| SFEGLIFNKYTL | HLA-A24:02 | TPD52L3 | Testis | 8556 |
| SFEGLMGTI | HLA-A24:02 | TPD52L3 | Testis | 8557 |
| TYESHSTSEL | HLA-A24:02 | TPD52L3 | Testis | 8558 |
| KKSATFRSF | HLA-A24:02 | TPD52L3 | Testis | 8559 |
| KTKLTKLEA | HLA-A30:01 | TPD52L3 | Testis | 8560 |
| RSFEGLIFNK | HLA-A30:01 | TPD52L3 | Testis | 8561 |
| KTSAALSTM | HLA-A30:01 | TPD52L3 | Testis | 8562 |
| VSNTYVKQK | HLA-A30:01 | TPD52L3 | Testis | 8563 |
| RSFEGLIFN | HLA-A30:01 | TPD52L3 | Testis | 8564 |
| STMGTLICR | HLA-A33:03 | TPD52L3 | Testis | 8565 |
| HVLAAKERR | HLA-A33:03 | TPD52L3 | Testis | 8566 |
| LSTMGTLICR | HLA-A33:03 | TPD52L3 | Testis | 8567 |
| GVKKSATFR | HLA-A33:03 | TPD52L3 | Testis | 8568 |
| EDLTEPEQR | HLA-A33:03 | TPD52L3 | Testis | 8569 |
| EAEIVTLR | HLA-A33:03 | TPD52L3 | Testis | 8570 |
| MPHARTETSV | HLA-B07:02 | TPD52L3 | Testis | 8571 |
| YVKQKTSAAL | HLA-B07:02 | TPD52L3 | Testis | 8572 |
| MPHARTETS | HLA-B07:02 | TPD52L3 | Testis | 8573 |
| NPKGEGSRI | HLA-B07:02 | TPD52L3 | Testis | 8574 |
| SAALSTMGTL | HLA-B07:02 | TPD52L3 | Testis | 8575 |
| YVKQKTSAAL | HLA-B08:01 | TPD52L3 | Testis | 8576 |
| YVKQKTSAA | HLA-B08:01 | TPD52L3 | Testis | 8577 |
| ELKTKLTKL | HLA-B08:01 | TPD52L3 | Testis | 8578 |
| ELKRKLGL | HLA-B08:01 | TPD52L3 | Testis | 8579 |
| LIFNKYTL | HLA-B08:01 | TPD52L3 | Testis | 8580 |
| RSFEGLMGTI | HLA-B13:02 | TPD52L3 | Testis | 8581 |
| AEIVTLRHV | HLA-B13:02 | TPD52L3 | Testis | 8582 |
| LDVQVSNTYV | HLA-B13:02 | TPD52L3 | Testis | 8583 |
| ALSTMGTLI | HLA-B13:02 | TPD52L3 | Testis | 8584 |
| KLEAEIVTL | HLA-B13:02 | TPD52L3 | Testis | 8585 |
| NLSKSWLDV | HLA-B13:02 | TPD52L3 | Testis | 8586 |
| KTSAALSTM | HLA-B46:01 | TPD52L3 | Testis | 8587 |
| YVKQKTSAA | HLA-B46:01 | TPD5213 | Testis | 8588 |
| AALSTMGTL | HLA-B46:01 | TPD52L3 | Testis | 8589 |
| TSVGTYESH | HLA-B46:01 | TPD52L3 | Testis | 8590 |
| RSFEGLIF | HLA-B46:01 | TPD52L3 | Testis | 8591 |
| KTSAALSTM | HLA-C01:02 | TPD52L3 | Testis | 8592 |
| AALSTMGTL | HLA-C01:02 | TPD52L3 | Testis | 8593 |
| YVKQKTSAAL | HLA-C01:02 | TPD52L3 | Testis | 8594 |
| TEPEQREL | HLA-C01:02 | TPD52L3 | Testis | 8595 |
| ESHSTSEL | HLA-C01:02 | TPD52L3 | Testis | 8596 |
| YESHSTSEL | HLA-C01:02 | TPD52L3 | Testis | 8597 |
| AALSTMGTL | HLA-C03:04 | TPD52L3 | Testis | 8598 |
| KTSAALSTM | HLA-C03:04 | TPD52L3 | Testis | 8599 |
| SAALSTMGTL | HLA-C03:04 | TPD52L3 | Testis | 8600 |
| LTEPEQREL | HLA-C03:04 | TPD52L3 | Testis | 8601 |
| YESHSTSEL | HLA-C03:04 | TPD52L3 | Testis | 8602 |
| YESHSTSEL | HLA-C04:01 | TPD52L3 | Testis | 8603 |
| FRSFEGLIF | HLA-C04:01 | TPD52L3 | Testis | 8604 |
| SFEGLMGTI | HLA-C04:01 | TPD52L3 | Testis | 8605 |
| TYESHSTSEL | HLA-C04:01 | TPD52L3 | Testis | 8606 |
| SFEGLIFN | HLA-C04:01 | TPD52L3 | Testis | 8607 |
| KLEAEIVTL | HLA-C04:01 | TPD52L3 | Testis | 8608 |
| FRSFEGLIP | HLA-C07:01 | TPD52L3 | Testis | 8609 |
| KRKLGLTAL | HLA-C07:01 | TPD52L3 | Testis | 8610 |
| FRSFEGLM | HLA-C07:01 | TPD52L3 | Testis | 8611 |
| RSFEGLIF | HLA-C07:01 | TPD52L3 | Testis | 8612 |
| LTEPEQREL | HLA-C07:01 | TPD52L3 | Testis | 8613 |
| KSATFRSF | HLA-C07:01 | TPD52L3 | Testis | 8614 |
| FRSFEGLIF | HLA-C07:02 | TPD52L3 | Testis | 8615 |
| KRKLGLTAL | HLA-C07:02 | TPD52L3 | Testis | 8616 |
| TFRSFEGLM | HLA-C07:02 | TPD52L3 | Testis | 8617 |
| ARTETSVGTY | HLA-C07:02 | TPD52L3 | Testis | 8618 |
| FADFCMGMY | HLA-A01:01 | TSHR | Thyroid | 8619 |
| SVDLYTHSEY | HLA-A01:01 | TSHR | Thyroid | 8620 |
| SVDLYTHSEYY | HLA-A01:01 | TSHR | Thyroid | 8621 |
| DTETPLALAY | HLA-A01:01 | TSHR | Thyroid | 8622 |
| VIDKDAFGGVY | HLA-A01:01 | TSHR | Thyroid | 8623 |
| FLLALLPLV | HLA-A02:01 | TSHR | Thyroid | 8624 |
| FLMCNLAFA | HLA-A02:01 | TSHR | Thyroid | 8625 |
| SLFSWLYRL | HLA-A02:01 | TSHR | Thyroid | 8626 |
| KMFPDLTKV | HLA-A02:01 | TSHR | Thyroid | 8627 |
| ALLGNVFVL | HLA-A02:01 | TSHR | Thyroid | 8628 |
| CFLLALLPLV | HLA-A02:01 | TSHR | Thyroid | 8629 |
| FLYAIFTKA | HLA-A02:01 | TSHR | Thyroid | 8630 |
| SLFSWLYRLPL | HLA-A02:01 | TSHR | Thyroid | 8631 |
| CMAPISFYA | HLA-A02:01 | TSHR | Thyroid | 8632 |
| KSLFSWLYRL | HLA-A02:01 | TSHR | Thyroid | 8633 |
| RFLMCNLAFA | HLA-A02:01 | TSHR | Thyroid | 8634 |
| SLLALLGNV | HLA-A02:01 | TSHR | Thyroid | 8635 |
| SLLDVSQTSV | HLA-A02:01 | TSHR | Thyroid | 8636 |
| ILNKPLITV | HLA-A02:01 | TSHR | Thyroid | 8637 |
| SLLVENVAV | HLA-A02:01 | TSHR | Thyroid | 8638 |
| FLRIVVWFV | HLA-A02:01 | TSHR | Thyroid | 8639 |
| KLYNNGFTSV | HLA-A02:01 | TSHR | Thyroid | 8640 |
| ALLGNVFV | HLA-A02:01 | TSHR | Thyroid | 8641 |
| ALAYIVFVL | HLA-A02:01 | TSHR | Thyroid | 8642 |
| ITFAMRLDRK | HLA-A03:01 | TSHR | Thyroid | 8643 |
| WLYRLPLGRK | HLA-A03:01 | TSHR | Thyroid | 8644 |
| ALKELPLLK | HLA-A03:01 | TSHR | Thyroid | 8645 |
| KLDAVYLNK | HLA-A03:01 | TSHR | Thyroid | 8646 |
| ILLSKFGICK | HLA-A03:01 | TSHR | Thyroid | 8647 |
| SLPPSTQTLK | HLA-A03:01 | TSHR | Thyroid | 8648 |
| ITFAMRLDRK | HLA-A11:01 | TSHR | Thyroid | 8649 |
| LILLTSHYK | HLA-A11:01 | TSHR | Thyroid | 8650 |
| KSLFSWLYR | HLA-A11:01 | TSHR | Thyroid | 8651 |
| AIFTKAFQR | HLA-A11:01 | TSHR | Thyroid | 8652 |
| AVSGKQFCK | HLA-A11:01 | TSHR | Thyroid | 8653 |
| SSMQSLRQR | HLA-A11:01 | TSHR | Thyroid | 8654 |
| KSLSFETQK | HLA-A11:01 | TSHR | Thyroid | 8655 |
| VYSTDIFFI | HLA-A24:02 | TSHR | Thyroid | 8656 |
| HYKLNVPRF | HLA-A24:02 | TSHR | Thyroid | 8657 |
| SYPSHCCAF | HLA-A24:02 | TSHR | Thyroid | 8658 |
| LYAIFTKAF | HLA-A24:02 | TSHR | Thyroid | 8659 |
| AYIVFVLTL | HLA-A24:02 | TSHR | Thyroid | 8660 |
| IYVSIDVTL | HLA-A24:02 | TSHR | Thyroid | 8661 |
| PYMTSIPVNAF | HLA-A24:02 | TSHR | Thyroid | 8662 |
| IARNTWTLK | HLA-A30:01 | TSHR | Thyroid | 8663 |
| KIRLRHACA | HLA-A30:01 | TSHR | Thyroid | 8664 |
| AYRGQRVPPK | HLA-A30:01 | TSHR | Thyroid | 8665 |
| RTIPSHAFS | HLA-A30:01 | TSHR | Thyroid | 8666 |
| KLDAVYLNK | HLA-A30:01 | TSHR | Thyroid | 8667 |
| GYKFLRIVV | HLA-A30:01 | TSHR | Thyroid | 8668 |
| KNKYLTVIDK | HLA-A30:01 | TSHR | Thyroid | 8669 |
| ALKELPLLK | HLA-A30:01 | TSHR | Thyroid | 8670 |
| DIMGYKFLR | HLA-A33:03 | TSHR | Thyroid | 8671 |
| YAIFTKAFQR | HLA-A33:03 | TSHR | Thyroid | 8672 |
| EDIMGYKFLR | HLA-A33:03 | TSHR | Thyroid | 8673 |
| AIFTKAFQR | HLA-A33:03 | TSHR | Thyroid | 8674 |
| WYAITFAMR | HLA-A33:03 | TSHR | Thyroid | 8675 |
| EHLKELIAR | HLA-A33:03 | TSHR | Thyroid | 8676 |
| YVKIYITVR | HLA-A33:03 | TSHR | Thyroid | 8677 |
| LPMDTETPL | HLA-B07:02 | TSHR | Thyroid | 8678 |
| RPADLLQLVL | HLA-B07:02 | TSHR | Thyroid | 8679 |
| IPSHAFSNL | HLA-B07:02 | TSHR | Thyroid | 8680 |
| LPLGRKSLSF | HLA-B07:02 | TSHR | Thyroid | 8681 |
| IPSLPPSTQTL | HLA-B07:02 | TSHR | Thyroid | 8682 |
| APISFYAL | HLA-B07:02 | TSHR | Thyroid | 8683 |
| RPADLLQL | HLA-B07:02 | TSHR | Thyroid | 8684 |
| SLRQRKSVNAL | HLA-B08:01 | TSHR | Thyroid | 8685 |
| YLNKNKYLTV | HLA-B08:01 | TSHR | Thyroid | 8686 |
| TLKKLPLSL | HLA-B08:01 | TSHR | Thyroid | 8687 |
| FSWLYRLPL | HLA-B08:01 | TSHR | Thyroid | 8688 |
| DLLQLVLL | HLA-B08:01 | TSHR | Thyroid | 8689 |
| TWTLKKLPL | HLA-B08:01 | TSHR | Thyroid | 8690 |
| MRLDRKIRL | HLA-B08:01 | TSHR | Thyroid | 8691 |
| TDIFFILEI | HLA-B13:02 | TSHR | Thyroid | 8692 |
| TDFICMAPI | HLA-B13:02 | TSHR | Thyroid | 8693 |
| ADFCMGMYLLLI | HLA-B13:02 | TSHR | Thyroid | 8694 |
| FTDFICMAPI | HLA-B13:02 | TSHR | Thyroid | 8695 |
| AQAYRGQRV | HLA-B13:02 | TSHR | Thyroid | 8696 |
| RPADLLQLV | HLA-B13:02 | TSHR | Thyroid | 8697 |
| KMFPDLTKV | HLA-B13:02 | TSHR | Thyroid | 8698 |
| GQISEEYMQ | HLA-B13:02 | TSHR | Thyroid | 8699 |
| YAFNGTKLDAVY | HLA-B46:01 | TSHR | Thyroid | 8700 |
| FTSVQGYAF | HLA-B46:01 | TSHR | Thyroid | 8701 |
| YAKVSICLPM | HLA-B46:01 | TSHR | Thyroid | 8702 |
| MTSIPVNAF | HLA-B46:01 | TSHR | Thyroid | 8703 |
| LSYPSHCCAF | HLA-B46:01 | TSHR | Thyroid | 8704 |
| YAIFTKAF | HLA-B46:01 | TSHR | Thyroid | 8705 |
| VAFVIVCCCY | HLA-B46:01 | TSHR | Thyroid | 8706 |
| ALNSPLHQEY | HLA-B46:01 | TSHR | Thyroid | 8707 |
| SLPPSTQTL | HLA-C01:02 | TSHR | Thyroid | 8708 |
| MAPISFYAL | HLA-C01:02 | TSHR | Thyroid | 8709 |
| FSWLYRLPL | HLA-C01:02 | TSHR | Thyroid | 8710 |
| YAITFAMRL | HLA-C01:02 | TSHR | Thyroid | 8711 |
| RLPLGRKSL | HLA-C01:02 | TSHR | Thyroid | 8712 |
| LLPLGRKSL | HLA-C01:02 | TSHR | Thyroid | 8713 |
| YAITFAMRL | HLA-C03:04 | TSHR | Thyroid | 8714 |
| ISFYALSAI | HLA-C03:04 | TSHR | Thyroid | 8715 |
| HAFSNLPNI | HLA-C03:04 | TSHR | Thyroid | 8716 |
| FSWLYRLPL | HLA-C03:04 | TSHR | Thyroid | 8717 |
| YSTDIFFIL | HLA-C03:04 | TSHR | Thyroid | 8718 |
| LAYIVEVLTL | HLA-C03:04 | TSHR | Thyroid | 8719 |
| FADFCMGMYL | HLA-C03:04 | TSHR | Thyroid | 8720 |
| VYSGPSLLL | HLA-C04:01 | TSHR | Thyroid | 8721 |
| FADFCMGMYL | HLA-C04:01 | TSHR | Thyroid | 8722 |
| SYPSHCCAF | HLA-C04:01 | TSHR | Thyroid | 8723 |
| SLPPSTQTL | HLA-C04:01 | TSHR | Thyroid | 8724 |
| MFPDLTKVY | HLA-C04:01 | TSHR | Thyroid | 8725 |
| FFEEQEDEI | HLA-C04:01 | TSHR | Thyroid | 8726 |
| IFNTGLKMF | HLA-C04:01 | TSHR | Thyroid | 8727 |
| FYNLSKVTHI | HLA-C04:01 | TSHR | Thyroid | 8728 |
| VFVLLILL | HLA-C04:01 | TSHR | Thyroid | 8729 |
| MRLDRKIRL | HLA-C07:01 | TSHR | Thyroid | 8730 |
| IRNTRNLTY | HLA-C07:01 | TSHR | Thyroid | 8731 |
| LRHACAIMV | HLA-C07:01 | TSHR | Thyroid | 8732 |
| YKLNVPREL | HLA-C07:01 | TSHR | Thyroid | 8733 |
| MRPADLLQL | HLA-C07:01 | TSHR | Thyroid | 8734 |
| HNMEDVYEL | HLA-C07:01 | TSHR | Thyroid | 8735 |
| HNNAHYYVF | HLA-C07:01 | TSHR | Thyroid | 8736 |
| KRMAVLIF | HLA-C07:01 | TSHR | Thyroid | 8737 |
| MRPADLLQL | HLA-C07:02 | TSHR | Thyroid | 8738 |
| IRNTRNLTY | HLA-C07:02 | TSHR | Thyroid | 8739 |
| MRLDRKIRL | HLA-C07:02 | TSHR | Thyroid | 8740 |
| SYPSHCCAF | HLA-C07:02 | TSHR | Thyroid | 8741 |
| AYIVFVLTL | HLA-C07:02 | TSHR | Thyroid | 8742 |
| HNNAHYYVF | HLA-C07:02 | TSHR | Thyroid | 8743 |
| IYVSIDVTL | HLA-C07:02 | TSHR | Thyroid | 8744 |
| YQDWQQNLY | HLA-A01:01 | TSPAN10 | Melanoma | 8745 |
| ASYQDWQQNLY | HLA-A01:01 | TSPAN10 | Melanoma | 8746 |
| VSAVSLAGY | HLA-A01:01 | TSPAN10 | Melanoma | 8747 |
| LLDQVQLGL | HLA-A01:01 | TSPAN10 | Melanoma | 8748 |
| FLSNFPFSL | HLA-A02:01 | TSPAN10 | Melanoma | 8749 |
| FLSNFPFSLL | HLA-A02:01 | TSPAN10 | Melanoma | 8750 |
| FLLDQVQLGL | HLA-A02:01 | TSPANIQ | Melanoma | 8751 |
| IFLSNFPPSL | HLA-A02:01 | TSPAN10 | Melanoma | 8752 |
| FLVLEAVAGA | HLA-A02:01 | TSPAN10 | Melanoma | 8753 |
| ALAIGLWGL | HLA-A02:01 | TSPAN10 | Melanoma | 8754 |
| SLLGLLALA | HLA-A02:01 | TSPAN10 | Melanoma | 8755 |
| YLIFLSNFPFSL | HLA-A02:01 | TSPAN10 | Melanoma | 8756 |
| GLLALAIGL | HLA-A02:01 | TSPAN10 | Melanoma | 8757 |
| FLLDQVQL | HLA-A02:01 | TSPAN10 | Melanoma | 8758 |
| ALGGLVVSA | HLA-A02:01 | TSPAN10 | Melanoma | 8759 |
| GLALGGLVV | HLA-A02:01 | TSPAN10 | Melanoma | 8760 |
| SLAGYLGAL | HLA-A02:01 | TSPAN10 | Melanoma | 8761 |
| AIGLWGLAVK | HLA-A03:01 | TSPAN10 | Melanoma | 8762 |
| SLSPGSSCVK | HLA-A03:01 | TSPAN10 | Melanoma | 8763 |
| VVSAVSLAGY | HLA-A03:01 | TSPAN10 | Melanoma | 8764 |
| ALAIGLWGLAVK | HLA-A03:01 | TSPAN10 | Melanoma | 8765 |
| RLLGALAAR | HLA-A03:01 | TSPAN10 | Melanoma | 8766 |
| SLSPGSSCVK | HLA-A11:01 | TSPAN10 | Melanoma | 8767 |
| AIGLWGLAVK | HLA-A11:01 | TSPAN10 | Melanoma | 8768 |
| VVSAVSLAGY | HLA-A11:01 | TSPAN10 | Melanoma | 8769 |
| AIAVVLLQG | HLA-A11:01 | TSPAN10 | Melanoma | 8770 |
| AVAGALVVA | HLA-A11:01 | TSPAN10 | Melanoma | 8771 |
| KYLIFLSNF | HLA-A24:02 | TSPAN10 | Melanoma | 8772 |
| KYLIFLSNFPF | HLA-A24:02 | TSPAN10 | Melanoma | 8773 |
| VKYLIFLSNF | HLA-A24:02 | TSPAN10 | Melanoma | 8774 |
| SYQDWQQNLYF | HLA-A24:02 | TSPAN10 | Melanoma | 8775 |
| SYQDWQQNL | HLA-A24:02 | TSPAN10 | Melanoma | 8776 |
| AARLLGALA | HLA-A30:01 | TSPAN10 | Melanoma | 8777 |
| AARRGAAYG | HLA-A30:01 | TSPAN10 | Melanoma | 8778 |
| RGFSGGILA | HLA-A30:01 | TSPAN10 | Melanoma | 8779 |
| SYQDWQQNL | HLA-A30:01 | TSPAN10 | Melanoma | 8780 |
| RFLLDQVQL | HLA-A30:01 | TSPAN10 | Melanoma | 8781 |
| DQCGFGVLR | HLA-A33:03 | TSPANI0 | Melanoma | 8782 |
| CGPPLRRWLR | HLA-A33:03 | TSPAN10 | Melanoma | 8783 |
| RLLGALAAR | HLA-A33:03 | TSPAN10 | Melanoma | 8784 |
| DSLEHTLR | HLA-A33:03 | TSPAN10 | Melanoma | 8785 |
| HYQDDPDLR | HLA-A33:03 | TSPAN10 | Melanoma | 8786 |
| TPKKGPAPSL | HLA-B07:02 | TSPAN10 | Melanoma | 8787 |
| LPADPMLGLAL | HLA-B07:02 | TSPAN10 | Melanoma | 8788 |
| SPGVQACSL | HLA-B07:02 | TSPAN10 | Melanoma | 8789 |
| LPADPMLQL | HLA-B07:02 | TSPAN10 | Melanoma | 8790 |
| APSLSPGSSC | HLA-B07:02 | TSPAN10 | Melanoma | 8791 |
| LLAARLLGAL | HLA-B08:01 | TSPAN10 | Melanoma | 8792 |
| ALAARRGAA | HLA-B08:01 | TSPAN10 | Melanoma | 8793 |
| FLSNFPFSL | HLA-B08:01 | TSPAN10 | Melanoma | 8794 |
| DAAQRVVYL | HLA-B08:01 | TSPAN10 | Melanoma | 8795 |
| PPETKHQAL | HLA-B08:01 | TSPAN10 | Melanoma | 8796 |
| DPMLGLAL | HLA-B08:01 | TSPAN10 | Melanoma | 8797 |
| LEAVAGALV | HLA-B13:02 | TSPAN10 | Melanoma | 8798 |
| LEAVAGALVV | HLA-B13:02 | TSPAN10 | Melanoma | 8799 |
| LAFLVLEAV | HLA-B13:02 | TSPAN10 | Melanoma | 8800 |
| GLALGGLVV | HLA-B13:02 | TSPAN10 | Melanoma | 8801 |
| GLWGLAVKG | HLA-B13:02 | TSPAN10 | Melanoma | 8802 |
| RLDADAAQRV | HLA-B13:02 | TSPAN10 | Melanoma | 8803 |
| LAARRGAAY | HLA-B46:01 | TSPAN10 | Melanoma | 8804 |
| FLSNFPFSL | HLA-B46:01 | TSPAN10 | Melanoma | 8805 |
| LAARLLGAL | HLA-B46:01 | TSPAN10 | Melanoma | 8806 |
| FSLLGLLAL | HLA-B46:01 | TSPAN10 | Melanoma | 8807 |
| SSCVKYLIF | HLA-B46:01 | TSPAN10 | Melanoma | 8808 |
| VHRPPTSGC | HLA-B46:01 | TSPAN10 | Melanoma | 8809 |
| TLRVAIAHY | HLA-B46:01 | TSPAN10 | Melanoma | 8810 |
| FLSNFPFSL | HLA-C01:02 | TSPAN10 | Melanoma | 8811 |
| LSNFPFSLL | HLA-C01:02 | TSPAN10 | Melanoma | 8812 |
| YLEGCGPPL | HLA-C01:02 | TSPAN10 | Melanoma | 8813 |
| SSPGVQACSL | HLA-C01:02 | TSPAN10 | Melanoma | 8814 |
| NFPFSLLGL | HLA-C01:02 | TSPAN10 | Melanoma | 8815 |
| ADPMLGLAL | HLA-C01:02 | TSPAN10 | Melanoma | 8816 |
| LAASGGYAI | HLA-C03:04 | TSPAN10 | Melanoma | 8817 |
| FSLLGLLAL | HLA-C03:04 | TSPAN10 | Melanoma | 8818 |
| LAARLLGAL | HLA-C03:04 | TSPAN10 | Melanoma | 8819 |
| YAIAVVLL | HLA-C03:04 | TSPAN10 | Melanoma | 8820 |
| LSNFPFSLL | HLA-C03:04 | TSPAN10 | Melanoma | 8821 |
| YQDDPDLRF | HLA-C04:01 | TSPAN10 | Melanoma | 8822 |
| FLSNFPFSL | HLA-C04:01 | TSPAN10 | Melanoma | 8823 |
| YQDWQQNLY | HLA-C04:01 | TSPAN10 | Melanoma | 8824 |
| NFPFSLLGL | HLA-C04:01 | TSPAN10 | Melanoma | 8825 |
| GYAIAVVLL | HLA-C04:01 | TSPAN10 | Melanoma | 8826 |
| LRRWLRANL | HLA-C07:01 | TSPAN10 | Melanoma | 8827 |
| FLSNFPFSL | HLA-C07:01 | TSPAN10 | Melanoma | 8828 |
| HRPPTSGCL | HLA-C07:01 | TSPAN10 | Melanoma | 8829 |
| RGFSGGILAF | HLA-C07:01 | TSPAN10 | Melanoma | 8830 |
| CLGPVPRED | HLA-C07:01 | TSPAN10 | Melanoma | 8831 |
| SYQDWQQNL | HLA-C07:02 | TSPAN10 | Melanoma | 8832 |
| FLSNFPFSL | HLA-C07:02 | TSPAN10 | Melanoma | 8833 |
| HRPPTSGCL | HLA-C07:02 | TSPAN10 | Melanoma | 8834 |
| KKGPAPSL | HLA-C07:02 | TSPAN10 | Melanoma | 8835 |
| SSCPAFLRY | HLA-A01:01 | UBQLN3 | Testis | 8836 |
| YTDIMDPML | HLA-A01:01 | UBQLN3 | Testis | 8837 |
| RSSCPAFLRY | HLA-A01:01 | UBQLN3 | Testis | 8838 |
| LTGLSRLGLAY | HLA-A01:01 | UBQLN3 | Testis | 8839 |
| YTDIMDPMLN | HLA-A01:01 | UBQLN3 | Testis | 8840 |
| YTDIMDPMLNAV | HLA-A01:01 | UBQLN3 | Testis | 8841 |
| RLYDYLQQL | HLA-A02:01 | UBQLN3 | Testis | 8842 |
| IMDPMLNAV | HLA-A02:01 | UBQLN3 | Testis | 8843 |
| FLSPPFLHML | HLA-A02:01 | UBQLN3 | Testis | 8844 |
| SLMRQHVSV | HLA-A02:01 | UBQLN3 | Testis | 8845 |
| FLHMLQDLV | HLA-A02:01 | UBQLN3 | Testis | 8846 |
| IRLYDYLQQL | HLA-A02:01 | UBQLN3 | Testis | 8847 |
| LLWFMPCLA | HLA-A02:01 | UBQLN3 | Testis | 8848 |
| LLLWFMPCL | HLA-A02:01 | UBQLN3 | Testis | 8849 |
| FLSPPFLHM | HLA-A02:01 | UBQLN3 | Testis | 8850 |
| GLLTGLSRL | HLA-A02:01 | UBQLN3 | Testis | 8851 |
| VQDPHLIKV | HLA-A02:01 | UBQLN3 | Testis | 8852 |
| GLGDSANRV | HLA-A02:01 | UBQLN3 | Testis | 8853 |
| GLLSNTGLV | HLA-A02:01 | UBQLN3 | Testis | 8854 |
| VLATEAPRL | HLA-A02:01 | UBQLN3 | Testis | 8855 |
| QLHENPQSL | HLA-A02:01 | UBQLN3 | Testis | 8856 |
| RLYDYLQQLH | HLA-A03:01 | UBQLN3 | Testis | 8857 |
| LIKVTVKTPK | HLA-A03:01 | UBQLN3 | Testis | 8858 |
| APVQDPHLIK | HLA-A03:01 | UBQLN3 | Testis | 8859 |
| GLSRLGLAYR | HLA-A03:01 | UBQLN3 | Testis | 8860 |
| RLYDYLQQL | HLA-A03:01 | UBQLN3 | Testis | 8861 |
| RLLLWFMPC | HLA-A03:01 | UBQLN3 | Testis | 8862 |
| GLSRLGLAY | HLA-A03:01 | UBQLN3 | Testis | 8863 |
| RSSCPAFLR | HLA-A11:01 | UBQLN3 | Testis | 8864 |
| APVQDPHLIK | HLA-A11:01 | UBQLN3 | Testis | 8865 |
| TDTCTIQQLK | HLA-A11:01 | UBQLN3 | Testis | 8866 |
| SSCPAFLRY | HLA-A11:01 | UBQLN3 | Testis | 8867 |
| SVAGGIESR | HLA-A11:01 | UBQLN3 | Testis | 8868 |
| PVQDPHLIK | HLA-A11:01 | UBQLN3 | Testis | 8869 |
| RFPNFLGII | HLA-A24:02 | UBQLN3 | Testis | 8870 |
| IYPADGPPAF | HLA-A24:02 | UBQLN3 | Testis | 8871 |
| RVPFAPLSF | HLA-A24:02 | UBQLN3 | Testis | 8872 |
| TYLQGTASAL | HLA-A24:02 | UBQLN3 | Testis | 8873 |
| MYTDIMDPML | HLA-A24:02 | UBQLN3 | Testis | 8874 |
| PLPNPPPEVF | HLA-A24:02 | UBQLN3 | Testis | 8875 |
| GFPDQPSSL | HLA-A24:02 | UBQLN3 | Testis | 8876 |
| IRNRFPNFLGI | HLA-A30:01 | UBQLN3 | Testis | 8877 |
| KGRSSCPAFL | HLA-A30:01 | UBQLN3 | Testis | 8878 |
| RSMGFLNREA | HLA-A30:01 | UBQLN3 | Testis | 8879 |
| LSRLGLAYR | HLA-A30:01 | UBQLN3 | Testis | 8880 |
| PVQDPHLIK | HLA-A30:01 | UBQLN3 | Testis | 8881 |
| RLYDYLQQL | HLA-A30:01 | UBQLN3 | Testis | 8882 |
| RQIEQGLQV | HLA-A30:01 | UBQLN3 | Testis | 8883 |
| GVRDGLTVHL | HLA-A30:01 | UBQLN3 | Testis | 8884 |
| LSRLGLAYR | HLA-A33:03 | UBQLN3 | Testis | 8885 |
| QVLATEAPR | HLA-A33:03 | UBQLN3 | Testis | 8886 |
| IMRQTLEFLR | HLA-A33:03 | UBQLN3 | Testis | 8887 |
| MANPRALQALR | HLA-A33:03 | UBQLN3 | Testis | 8888 |
| SVAGGIESR | HLA-A33:03 | UBQLN3 | Testis | 8889 |
| DAPDIRNR | HLA-A33:03 | UBQLN3 | Testis | 8890 |
| QLKEEISQR | HLA-A33:03 | UBQLN3 | Testis | 8891 |
| ESVAIKGR | HLA-A33:03 | UBQLN3 | Testis | 8892 |
| YPRSLRPDGM | HLA-B07:02 | UBQLN3 | Testis | 8893 |
| SPAYPRSL | HLA-B07:02 | UBQLN3 | Testis | 8894 |
| LPQGSPAPV | HLA-B07:02 | UBQLN3 | Testis | 8895 |
| LPSPAYPRSL | HLA-B07:02 | UBQLN3 | Testis | 8896 |
| FPALDSAEL | HLA-B07:02 | UBQLN3 | Testis | 8897 |
| YPADGPPAF | HLA-B07:02 | UBQLN3 | Testis | 8898 |
| LPNPPPEVF | HLA-B07:02 | UBQLN3 | Testis | 8899 |
| NPQSLGTYL | HLA-B07:02 | UBQLN3 | Testis | 8900 |
| SLMRQHVSV | HLA-B08:01 | UBQLN3 | Testis | 8901 |
| VIKRQHRAM | HLA-B08:01 | UBQLN3 | Testis | 8902 |
| LMRQHVSV | HLA-B08:01 | UBQLN3 | Testis | 8903 |
| LVIKRQHRAM | HLA-B08:01 | UBQLN3 | Testis | 8904 |
| DPHLIKVTV | HLA-B08:01 | UBQLN3 | Testis | 8905 |
| ILKDPDSL | HLA-B08:01 | UBQLN3 | Testis | 8906 |
| TGLVRQLVL | HLA-B08:01 | UBQLN3 | Testis | 8907 |
| DQPPAFSL | HLA-B08:01 | UBQLN3 | Testis | 8908 |
| RQIEQGLQV | HLA-B13:02 | UBQLN3 | Testis | 8909 |
| RDGLTVHLVI | HLA-B13:02 | UBQLN3 | Testis | 8910 |
| RDGLTVHLV | HLA-B13:02 | UBQLN3 | Testis | 8911 |
| LSFSPTAAI | HLA-B13:02 | UBQLN3 | Testis | 8912 |
| LESIPGGYNV | HLA-B13:02 | UBQLN3 | Testis | 8913 |
| RLYDYLQQL | HLA-B13:02 | UBQLN3 | Testis | 8914 |
| VQDPHLIKV | HLA-B13:02 | UBQLN3 | Testis | 8915 |
| HLIKVTVKT | HLA-B13:02 | UBQLN3 | Testis | 8916 |
| FSVTDTCTI | HLA-B46:01 | UBQLN3 | Testis | 8917 |
| FLSPPFLHM | HLA-B46:01 | UBQLN3 | Testis | 8918 |
| LSFSPTAAI | HLA-B46:01 | UBQLN3 | Testis | 8919 |
| AAMANPRAL | HLA-B46:01 | UBQLN3 | Testis | 8920 |
| NAIKGRSSC | HLA-B46:01 | UBQLN3 | Testis | 8921 |
| AAIPGIPEP | HLA-B46:01 | UBQLN3 | Testis | 8922 |
| QLHENPQSL | HLA-B46:01 | UBQLN3 | Testis | 8923 |
| YPADGPPAF | HLA-B46:01 | UBQLN3 | Testis | 8924 |
| SVPEFVTQL | HLA-C01:02 | UBQLN3 | Testis | 8925 |
| LSPPFLHML | HLA-C01:02 | UBQLN3 | Testis | 8926 |
| YLQGTASAL | HLA-C01:02 | UBQLN3 | Testis | 8927 |
| FLSPPFLHM | HLA-C01:02 | UBQLN3 | Testis | 8928 |
| SIPGGYNVL | HLA-C01:02 | UBQLN3 | Testis | 8929 |
| NLPDLVSGL | HLA-C01:02 | UBQLN3 | Testis | 8930 |
| PSPAYPRSL | HLA-C01:02 | UBQLN3 | Testis | 8931 |
| AAMANPRAL | HLA-C03:04 | UBQLN3 | Testis | 8932 |
| LSFSPTAAI | HLA-C03:04 | UBQLN3 | Testis | 8933 |
| FSVTDTCTI | HLA-C03:04 | UBQLN3 | Testis | 8934 |
| FSLGLLTGL | HLA-C03:04 | UBQLN3 | Testis | 8935 |
| FLSPPFLHM | HLA-C03:04 | UBQLN3 | Testis | 8936 |
| KAHPDQLVL | HLA-C03:04 | UBQLN3 | Testis | 8937 |
| LATEAPRLL | HLA-C03:04 | UBQLN3 | Testis | 8938 |
| FPDQPSSLM | HLA-C04:01 | UBQLN3 | Testis | 8939 |
| MYTDIMDPM | HLA-C04:01 | UBQLN3 | Testis | 8940 |
| YTDIMDPML | HLA-C04:01 | UBQLN3 | Testis | 8941 |
| FLSPPFLHM | HLA-C04:01 | UBQLN3 | Testis | 8942 |
| LYDYLQQL | HLA-C04:01 | UBQLN3 | Testis | 8943 |
| IMDPMLNAV | HLA-C04:01 | UBQLN3 | Testis | 8944 |
| VRDGLTVHL | HLA-C04:01 | UBQLN3 | Testis | 8945 |
| VFPALDSAEL | HLA-C04:01 | UBQLN3 | Testis | 8946 |
| IRNRFPNFL | HLA-C07:01 | UBQLN3 | Testis | 8947 |
| NRFPNELGI | HLA-C07:01 | UBQLN3 | Testis | 8948 |
| GRSSCPAFL | HLA-C07:01 | UBQLN3 | Testis | 8949 |
| RLYDYLQQL | HLA-C07:01 | UBQLN3 | Testis | 8950 |
| IRLYDYLQQL | HLA-C07:01 | UBQLN3 | Testis | 8951 |
| VRDGLTVHL | HLA-C07:01 | UBQLN3 | Testis | 8952 |
| IRSQDRVL | HLA-C07:01 | UBQLN3 | Testis | 8953 |
| SIPGGYNVL | HLA-C07:01 | UBQLN3 | Testis | 8954 |
| KAHPDQLVL | HLA-C07:01 | UBQLN3 | Testis | 8955 |
| IRNRFPNFL | HLA-C07:02 | UBQLN3 | Testis | 8956 |
| NRFPNFLGI | HLA-C07:02 | UBQLN3 | Testis | 8957 |
| RLYDYLQQL | HLA-C07:02 | UBQLN3 | Testis | 8958 |
| MYTDIMDPM | HLA-C07:02 | UBQLN3 | Testis | 8959 |
| NRVPFAPLSF | HLA-C07:02 | UBQLN3 | Testis | 8960 |
| MRQHVSVPEF | HLA-C07:02 | UBQLN3 | Testis | 8961 |
| NRVPFAPL | HLA-C07:02 | UBQLN3 | Testis | 8962 |

TABLE 1B
Tumor Epitope Sequences

| | SEQ | | | HLA | MS | | Allele | |
|---|---|---|---|---|---|---|---|---|
| Epitope | ID NO: | Target | Sample | class | validation | Allele (MS) | (predicted) | Cancer |
| AYSEKVTEF | 3534 | KLK2 | MDAPCa2b | I | X | HLA-C*06:02 | HLA- | Prostate |
| | | | | | | | A24:02 | |
| GLWTGGKDTCGV | 3468 | KLK2 | MDAPCa2b | I | | | HLA- | Prostate |
| | | | | | | | A02:01 | |
| HPEDTGQVF | 3988 | KLK3 | MDAPCa2b, | I | X | HLA-C*07:01 | HLA- | Prostate |
| | | | human prostate | | | HLA-C*04:01 | C07:01 | |
| HPEYNRPLL | 4143 | KLK4 | MDAPCa2b, | I | X | HLA-C*07:01 | HLA- | Prostate |
| | | | human prostate, | | | HLA-B*07:02 | B07:02 | |
| | | | breast cancer | | | | | |
| QRVPVSHSF | 3544 | KLK2 | MDAPCa2b, | I | X | HLA-C*07:01 | HLA- | Prostate |
| | | | human prostate | | | HLA-C*07:02 | A24:02 | |
| SESDTIRSI | 4176 | KLK4 | mantle cell | I | | | HLA- | Prostate |
| | | | lymphoma, | | | | B13:02 | |
| | | | breast cancer | | | | | |
| SLFHPEDTGQV | 3775 | KLK3 | MDAPCa2b | I | | | HLA- | Prostate |
| | | | | | | | A02:01 | |
| SLQCVSLHL | 3456 | KLK2 | MDAPCa2b, | I | | | HLA- | Prostate |
| | | | human prostate | | | | A02:01 | |
| VILLGRHSL | 3891 | KLK3 | PXD004023 | I | | | HLA- | Prostate |
| | | | | | | | B08:01 | |
| VLVHPQWVL | 3757 | KLK3 | MDAPCa2b | I | | | HLA | Prostate |
| | | | | | | | A02:01 | |
| LFHPEDTGQVF | 3827 | KLK3 | Human prostate | I | X | HLA-A*24:02 | HLA- | Prostate |
| | | | | | | | A24:02 | |
| RPRSLQCVSL | 3578 | KLK2 | Human prostate | I | | | HLA- | Prostate |
| | | | | | | | B07:02 | |
| GYLQGLVSF | 4094 | KLK4 | Human prostate | I | X | HLA-A*24:02 | HLA- | Prostate |
| | | | | | | | A24:02 | |
| IRNKSVILL | 3974 | KLK3 | Human prostate | I | X | HLA-C*06:02 | HLA- | Prostate |
| | | | | | | HLA-C*07:02 | C07:01 | |
| KLQCVDLHV | 3740 | KLK3 | Human prostate | I | X | HLA-A*02:01 | HLA- | Prostate |
| | | | | | | | A02:01 | |
| LLANGRMPTV | 4029 | KLK4 | Human prostate | I | X | HLA-A*02:01 | HLA- | Prostate |
| | | | | | | | A02:01 | |
| LRPGDDSTL | 3767 | KLK3 | Human prostate | I | X | HLA-C*07:02 | HLA- | Prostate |
| | | | | | | | C07:02 | |
| MPALPMVL | 3874 | KLK3 | Human prostate | I | X | HLA-B*07:02 | HLA- | Prostate |
| | | | | | | | 807:02 | |
| NRPLLANDL | 4216 | KLK4 | Human prostate | I | X | HLA-C*06:02 | HLA- | Prostate |
| | | | | | | HLA-C*07:02 | C01:02 | |
| SLQCVSLHL | 3456 | KLK2 | Human prostate | I | X | HLA-A*02:01 | HLA- | Prostate |
| | | | | | | | A02:01 | |
| TWIAPPLQV | 3784 | KLK3 | Human prostate | I | X | HLA-C*04:01 | HLA- | Prostate |
| | | | | | | | A02:01 | |
| VFQVSHSF | 3828 | KLK3 | Human prostate | I | X | HLA-C*07:02 | HLA- | Prostate |
| | | | | | | | A24:02 | |
| YSEKVTEFML | 3454 | KLK2 | Human prostate | I | X | HLA-A*01:01 | HLA- | Prostate |
| | | | | | | | A01:01 | |
| LLSHGAVIEV | 831 | ANKRD | CD165, | I | X | HLA-A*02:01 | HLA- | Breast |
| | | 30A | HCC1500, | | | | A02:01 | |
| | | | CAMA1 | | | | | |
| SIPTKALEL | 942 | ANKRD | B721, A375, | I | | | HLA- | Breast |
| | | 30A | CAMA1, | | | | C01:02 | |
| | | | HCC1500 | | | | | |
| SQYSGQLKV | 927 | ANKRD | B721 | I | | | HLA- | Breast |
| | | 30A | | | | | B13:02 | |
| SVPNKALEL | 941 | ANKRD | B721, A375 | I | X | HLA-C*04:01 | HLA- | Breast |
| | | 30A | | | | | C01:02 | |
| SLSKILDTV | 826 | ANKRD | CAMA1, | I | X | HLA-A*02:01 | HLA- | Breast |
| | | 30A | HCC1500 | | | | A02:01 | |
| SIPTKALEL | 942 | ANKRD | CAMA1 | I | X | HLA-C*04:01 | HLA- | Breast |
| | | 30A | | | | | C01:02 | |
| SLDQKLFQL | 827 | ANKRD | CAMA1, | I | X | HLA-A*02:01 | HLA- | Breast |
| | | 30A | HCC1500 | | | | A02:01 | |
| SVPNKALEL | 941 | ANKRD | HCC1500 | I | | | HLA- | Breast |
| | | 30A | | | | | C01:02 | |
| DSLFFLRGR | 6132 | PRAME | expi293 | I | | | HLA- | Lung squam.; |
| | | | | | | | A33:03 | Melanoma; |
| | | | | | | | | Ovarian; |
| | | | | | | | | Uterine |
| ELFSYLIEK | 6108 | PRAME | melanoma, | I | | | HLA- | Lung squam.; |
| | | | Human | | | | A03:01 | Melanoma; |
| | | | expi293 | | | | | Ovarian; |
| | | | | | | | | Uterine |
| FYDPEPILC | 6166 | PRAME | Jurkat | I | | | HLA- | Lung squam.; |
| | | | | | | | C04:01 | Melanoma; |
| | | | | | | | | Ovarian; |
| | | | | | | | | Uterine |
| SISALQSL | 6161 | PRAME | A375 | I | | | HLA- | Lung squam.; |
| | | | | | | | C03:04 | Melanoma; |
| | | | | | | | | Ovarian; |
| | | | | | | | | Uterine |
| ITDDQLLAL | 6088 | PRAME | A375 | I | | | HLA- | Lung squam.; |
| | | | | | | | A01:01 | Melanoma; |
| | | | | | | | | Ovarian; |
| | | | | | | | | Uterine |
| KRKKNVLRL | 6173 | PRAME | Human | I | | | HLA- | Lung squam.; |
| | | | melanoma | | | | C07:01 | Melanoma; |
| | | | | | | | | Ovarian; |
| | | | | | | | | Uterine |
| LQSLLQHLI | 6146 | PRAME | Human | I | | | HLA- | Lung squam.; |
| | | | melanoma | | | | B13:02 | Melanoma; |
| | | | | | | | | Ovarian; |
| | | | | | | | | Uterine |
| LSHIHASSY | 6152 | PRAME | Human | I | | | HLA- | Lung squam. |
| | | | melanoma | | | | B46:01 | Melanoma; |
| | | | | | | | | Ovarian; |
| | | | | | | | | Uterine |
| PYLGQMINL | 6120 | PRAME | melanoma, | I | | | HLA- | Lung squam.; |
| | | | Human | | | | A24:02 | Melanoma; |
| | | | A375, expi293 | | | | | Ovarian; |
| | | | | | | | | Uterine |
| QLLALLPSL | 6093 | PRAME | H1 | I | | | HLA- | Lung squam.; |
| | | | | | | | A02:01 | Melanoma; |
| | | | | | | | | Ovarian; |
| | | | | | | | | Uterine |
| SFYGNSISI | 6174 | PRAME | expi293 | I | | | HLA- | Lung squam.; |
| | | | | | | | C07:01 | Melanoma; |
| | | | | | | | | Ovarian; |
| | | | | | | | | Uterine |
| SLLQHLIGL | 6095 | PRAME | JEKO, ovarian | I | X | HLA-A*02:01 | HLA- | Lung squam.; |
| | | | Expi293, | | | | A02:01 | Melanoma; |
| | | | MDAPCa2b, | | | | | Ovarian; |
| | | | A375, buman | | | | | Uterine |
| | | | melanoma. | | | | | |
| | | | carcinoma, H1, | | | | | |
| | | | LNZ308, JY, | | | | | |
| | | | Hek293, HeLa, | | | | | |
| | | | Roja, THP1 | | | | | |
| SPSVSQLSVL | 6139 | PRAME | Human | I | | | HLA- | Lung squam.; |
| | | | melanoma, lung | | | | B07:02 | Melanoma; |
| | | | cancer, JY, H1, | | | | | Ovarian; |
| | | | A375 | | | | | Uterine |
| SPYLGQMINL | 6138 | PRAME | melanoma | I | | | HLA- | Lung squam.; |
| | | | | | | | B07:02 | Melanoma; |
| | | | | | | | | Ovarian; |
| | | | | | | | | Uterine |
| ISPRRLVEL | 6159 | PRAME | melanoma, | I | | | HLA- | Lung squam.; |
| | | | Human | | | | C01:02 | Melanoma; |
| | | | A375 | | | | | Ovarian; |
| | | | | | | | | Uterine |
| VLYPVPLESY | 6105 | PRAME | melanoma, lung | I | | | HLA- | Lung squam.; |
| | | | Human | | | | A03:01 | Melanoma; |
| | | | cancer | | | | | Ovarian; |
| | | | | | | | | Uterine |
| VSPEPLQAL | 6156 | PRAME | A375 | I | | | HLA- | Lung squam.; |
| | | | | | | | C01:02 | Melanoma; |
| | | | | | | | | Ovarian; |
| | | | | | | | | Uterine |
| YLHARLREL | 6140 | PRAME | melanoma, | I | | | HLA- | Lung squam.; |
| | | | Human | | | | B08:01 | Melanoma; |
| | | | expi293 | | | | | Ovarian; |
| | | | | | | | | Uterine |
| RLDQLLRHV | 6104 | PRAME | Human | I | | | HLA- | Lung squam.; |
| | | | melanoma | | | | A02:01 | Melanoma; |
| | | | | | | | | Ovarian; |
| | | | | | | | | Uterine |
| EVDPASNTY | 4638 | MAGEA | GBM, A375 | I | X | HLA-A*01:01 | HLA- | Lung squam. |
| | | 4 | | | | | A01:01 | |
| GVYDGREHTV | 4653 | MAGEA | Lung tumor, | I | X | HLA-A*02:01 | HLA- | Lung squam. |
| | | 4 | GBM, OvCa13, | | | | A02:01 | |
| | | | Breast tumor, | | | | | |
| | | | A375, | | | | | |
| | | | MSV000082648 | | | | | |
| KEVDPASNTY | 4640 | MAGEA | OvCa114, | I | | | HLA- | Lung squam. |
| | | 4 | A375, Lung | | | | A01:01 | |
| | | | tumor | | | | | |
| KVDELAHFL | 4648 | MAGEA | A375 | I | X | HLA-A*02:01 | HLA- | Lung squam. |
| | | 4 | | | | | A02:01 | |
| QIFPKTGL | 4692 | MAGEA | A375 | I | | | HLA- | Lung squam. |
| | | 4 | | | | | B08:01 | |
| QSPQGASAL | 4707 | MAGEA | A375 | I | | | HLA- | Lung squam. |
| | | 4 | | | | | C01:02 | |
| SALPTTISF | 4699 | MAGEA | Lung tumor | I | | | HLA- | Lung squam. |
| | | 4 | | | | | B46:01 | |
| TVYGEPRKL | 4722 | MAGEA | Human | I | | | HLA- | Lung squam. |
| | | 4 | melanoma. | | | | C07:01 | |
| | | | A375 | | | | | |
| VYGEPRKL | 4727 | MAGEA | A375 | I | | | HLA- | Lung squam. |
| | | 4 | | | | | C07:02 | |
| YPSLREAAL | 4682 | MAGEA | A375 | I | | | HLA- | Lung squam, |
| | | 4 | | | | | B07:02 | |
| ALLEEEEGV | 4644 | MAGEA | A375 | I | | | HLA- | Lung squam. |
| | | 4 | | | | | A02:01 | |
| KVLEHVVRV | 4643 | MAGEA | A375 | I | X | HLA-A*02:01 | HLA- | Lung squam. |
| | | 4 | | | | | A02:01 | |

TABLE 1C
Tumor Epitope Sequences

| | SEQ ID | | | HLA | MS | | Allele | |
|---|---|---|---|---|---|---|---|---|
| Epitope | NO: | Target | Sample | class | validation | Allele (MS) | (predicted) | Cancer |
| AYSEKVTEF | 3534 | KLK2 | MDAPCa2b | I | X | HLA-C*06:02 | HLA- | Prostate |
| | | | | | | | A24:02 | |
| HPEDTGQVF | 3988 | KLK3 | MDAPCa2b, | I | X | HLA-C*07:01 | HLA- | Prostate |
| | | | human prostate | | | HLA-C*04:01 | C07:01 | |
| HPEYNRPLL | 4143 | KLK4 | MDAPCa2b. | I | IX | HLA-C*07:01 | HLA- | Prostate |
| | | | human | | | HLA-B*07:02 | B07:02 | |
| | | | prostate, breast | | | | | |
| | | | cancer | | | | | |
| QRVPVSHSF | 3544 | KLK2 | MDAPCa2b, | I | IX | HLA-C*07:01 | HLA- | Prostate |
| | | | human prostate | | | HLA-C*07:02 | A24:02 | |
| LFHPEDTGQ | 3827 | KLK3 | Human | I | X | HLA-A*24:02 | HLA- | Prostate |
| VF | | | prostate | | | | A24:02 | |
| GYLQGLVSF | 4094 | KLK4 | Human | I | | HLA-A*24:02 | HLA- | Prostate |
| | | | prostate | | | | A24:02 | |
| IRNKSVILL | 3974 | KLK3 | Human | I | IX | HLA-C*06:02 | HLA- | Prostate |
| | | | prostate | | | HLA-C*07:02 | C07:01 | |
| KLQCVDLHV | 3740 | KLK3 | Human | I | | HLA-A*02:01 | HLA- | Prostate |
| | | | prostate | | | | A02:01 | |
| LLANGRMPT | 4029 | KLK4 | Human | I | X | HLA-A*02:01 | HLA- | Prostate |
| V | | | prostate | | | | A02:01 | |
| LRPGDDSTL | 3767 | KLK3 | Human | I | X | HLA-C*07:02 | HLA- | Prostate |
| | | | prostate | | | | C07:02 | |
| MPALPMVL | 3874 | KLK3 | Human | I | X | HLA-B*07:02 | HLA- | Prostate |
| | | | prostate | | | | B07:02 | |
| NRPLLANDL | 4216 | KLK4 | Human | I | X | HLA-C*06:02 | HLA- | Prostate |
| | | | prostate | | | HLA-C*07:02 | C01:02 | |
| SLQCVSLHL | 3456 | KLK2 | Human | I | X | HLA-A*02:01 | HLA- | Prostate |
| | | | prostate | | | | A02:01 | |
| TWIAPPLQV | 3784 | KLK3 | Human | I | X | HLA-C*04:01 | HLA- | Prostate |
| | | | prostate | | | | A02:01 | |
| VFQVSHSF | 3828 | KLK3 | Human | I | X | HLA-C*07:02 | HLA- | Prostate |
| | | | prostate | | | | A24:02 | |
| YSEKVTEFM | 3454 | KLK2 | Human | I | X | HLA-A*01:01 | HLA- | Prostate |
| L | | | prostate | | | | A01:01 | |
| LLSHGAVIE | 831 | ANKRD30A | CD165, | I | X | HLA-A*02:01 | HLA- | Breast |
| V | | | HCC1500, | | | | A02:01 | |
| | | | CAMA1 | | | | | |
| SVPNKALEL | 941 | ANKRD30A | B721, A375 | I | X | HLA-C*04:01 | HLA- | Breast |
| | | | | | | | C01:02 | |
| SLSKILDTV | 826 | ANKRD30A | CAMA1, | I | X | HLA-A*02:01 | HLA- | Breast |
| | | | HCC1500 | | | | A02:01 | |
| SIPTKALEL | 942 | ANKRD30A | CAMA1 | I | X | HLA-C*04:01 | HLA- | Breast |
| | | | | | | | C01:02 | |
| SLDQKLFQL | 827 | ANKRD30A | CAMA1, | I | | HLA-A*02:01 | HLA- | Breast |
| | | | HCC1500 | | | | A02:01 | |
| SLLQHLIGL | 6095 | PRAME | Expi293, | I | X | HLA-A*02:01 | HLA- | Lung squam.; |
| | | | MDAPCa2b, | | | | A02:01 | Melanoma; |
| | | | A375, human | | | | | Ovarian; Uterine |
| | | | melanoma, | | | | | |
| | | | JEKO, ovarian | | | | | |
| | | | carcinoma, H1, | | | | | |
| | | | LNZ308, JY | | | | | |
| | | | Hek293, HeLa, | | | | | |
| | | | Roja, THPI | | | | | |
| EVDPASNTY | 4638 | MAGEA4 | GBM, A375 | I | X | HLA-A*01:01 | HLA- | Lung squam. |
| | | | | | | | A01:01 | |
| GVYDGREHT | 4653 | MAGEA4 | 8 | I | X | HLA-A*02:01 | HLA- | Lung |
| V | | | GBM, | | | | A02:01 | squam. |
| | | | OvCa13, | | | | | |
| | | | Breast tumor, | | | | | |
| | | | Lung tumor, | | | | | |
| | | | A375, | | | | | |
| | | | MSV00008264 | | | | | |
| KVDELAHFL | 4648 | MAGEA4 | A375 | I | X | HLA-A*02:01 | HLA- | Lung squam. |
| | | | | | | | A02:01 | |
| KVLEHVVRV | 4643 | MAGEA4 | A375 | I | X | HLA-A*02:01 | HLA- | Lung |
| | | | | | | | A02:01 | squam. |

[0247] In aspects, provided herein are compositions comprising tissue-specific antigens. In some embodiments, the compositions comprise antigenic peptides, including tissue-specific antigens. In some embodiments, the tissue-specific antigens comprise tumor epitope sequence(s) as provided herein. In some embodiments, also provided herein are compositions comprising polynucleotides that code for the tissue-specific antigens.

[0248] In some embodiments, the size of the antigenic peptides provided herein comprise, but is not limited to, about 8, about 9, about 10, about 11, about 12, about 13, about 14, about 15, about 16, about 17, about 18, about 19, about 20, about 21, about 22, about 23, about 24, about 25, about 26, about 27, about 28, about 29, about 30, about 31, about 32, about 33, about 34, about 35, about 36, about 37, about 38, about 39, about 40, about 41, about 42, about 43, about 44, about 45, about 46, about 47, about 48, about 49, about 50, about 60, about 70, about 80, about 90, about 100, about 110, about 120 or greater amino molecule residues, and any range derivable therein.

[0249] In some embodiments, the antigenic peptides are equal to or less than 50 amino acids. In some embodiments, the antigenic peptides are equal to about 20 to about 30 amino acids. A longer peptide can be designed in several ways. For example, when the HLA-binding regions are predicted or known, a longer peptide can consist of either: individual binding peptides with an extension of 0-10 amino acids toward the N- and C-terminus of each corresponding gene product. A longer peptide can also consist of a concatenation of some or all of the binding peptides with extended sequences for each.

[0250] The antigenic peptides and polypeptides can bind to or can be predicted to bind to an HLA protein. The antigenic peptide can have or can be predicted to have an IC50 of about less than 1000 nM, about less than 500 nM, about less than 250 nM, about less than 200 nM, about less than 150 nM, about less than 100 nM, or about less than 50 nM. In some embodiments, the antigenic peptides do not induce an autoimmune response and/or invoke immunological tolerance when administered to a subject.

### Identification of Tissue-Specific Antigen

[0251] In some aspects, the present disclosure provides methods of identifying tissue-specific antigens. In some embodiments, the tissue-specific antigen can be a tumor tissue specific epitope sequence.

[0252] In some embodiments, the methods provided herein comprise identifying an epitope sequence, which binds to or is predicted to bind to a protein encoded by a MHC allele expressed by a human subject, and is encoded by a tissue-specific antigen epitope gene that has an expression level in a tumor from a target tissue that is at least 2 fold greater than an expression level of the tissue-specific antigen epitope gene in each tissue of a plurality of non-target tissues that are different than the target tissue.

[0253] In some embodiments, the methods provided herein comprise identifying an epitope gene that has a higher expression level in a target tissue than in a non-target tissue. For example, the methods can comprise identifying an epitope gene that has a higher expression level in human pancreatic tissue than in human breast tissue, human lung tissue, or other human essential tissues. In some cases, the expression level in human pancreatic tissue can be at least 2 fold higher than in human breast tissue. In some embodiments, the step of identifying an epitope gene that has a higher expression level in a target tissue than in a non-target tissue comprises comparing expression level of the epitope gene in the target tissue versus in the non-target tissue. The comparison can be done by looking up the expression level of the epitope gene, at mRNA transcript or protein level, or both, profiled in compiled datasets, like TCGA (portal.gdc.cancer.gov/, last accessed September 2018), GTEX (gtexportal.org/home/, last accessed September 2018), GENT (medicalgenome.kribb.re.kr/GENT/, last accessed September 2018), The Human Protein Atlas (proteinatlas.org/, last accessed September 2018), Expression Atlas (ebi.ac.uk/gxa/home, last accessed September 2018), BioXpress (hive.biochemistry.gwu.edu/tools/bioxpress, last accessed September 2018), MERAV (merav.wi.mit.edu, last accessed September 2018), Global Cancer Map (globalcancermap.com/, last accessed September 2018), and CGAP (cgap.nci.nih.gov/, last accessed September 2018). Alternatively, the comparison can be done by experimental methods for assessing gene expression level, such as, but not limited to, techniques for assessing mRNA transcripts level like real time RT-PCR (real time-polymerase chain reaction), microarray, Northern blot, ISH (in situ hybridization), and RNA-seq (RNA sequencing), and techniques for assessing protein expression level like mass spectrometry, protein array, peptide array, immunostaining, and Western blot. Alternatively, the comparison can be done by: 1) first looking up profiled expression level in complied datasets, such as those discussed above, and 2) then experimentally validating the expression level in the tissues of interest.

[0254] In some embodiments, the methods provided herein comprise identifying a tumor epitope gene that has a higher expression level in a tumor from a target tissue than in each tissue of a plurality of non-target tissues that are different than the target tissue. For example, a prostate tumor is from prostate tissue, the methods provided herein can comprise identifying a tumor epitope gene that has a higher expression level in the prostate tumor than in each of a plurality of non-target tissues that are different than prostate, such as, but not limited to, brain, colon, lung, heart, and bone marrow.

[0255] In some embodiments, the methods provided herein comprise identifying a tumor epitope gene that has a higher expression level in a tumor from a target tissue than in an essential tissue. In some embodiments, the target tissue is a non-essential tissue. In some embodiments, an essential tissue comprises brain, colon, heart, bone marrow, or lung. In some embodiments, a non-essential tissue comprises thyroid, pancreas, adrenal, fallopian, prostate, breast, ovary, or cervix.

[0256] As provided herein, the tissue from which a tumor is derived from can be termed as target tissue, and other tissues or in some cases, essential tissues, can be termed as off-target tissues. In some embodiments, the methods provided herein comprise identifying tissue-specific antigen based on its absolute expression level in target tissue and off-target tissues. The expression level can be, in some cases, evaluated by RNA-seq reads. In some cases, the expression level can be expressed in units like “transcripts per million” (TPM) by which it can mean that the gene of interest has certain number of mRNA transcripts over one million total mRNA transcripts in a tissue of concern. In some embodiments, TPM can denominate protein coding mRNA transcripts, and non-protein coding genes are excluded for consideration. In some embodiments, the methods provided herein comprise identifying epitope sequence that is encoded by a tumor epitope gene that has an expression level of at least about 100 TPM in the target tissue, and has an expression level of at most about 5 TPM in off-target tissues. In some embodiments, the expression level of the epitope gene in the target tissue can be at least 10 TPM, at least 20 TPM, at least 30 TPM, at least 40 TPM, at least 50 TPM, at least 60 TPM, at least 70 TPM, at least 80 TPM, at least 90 TPM, at least 100 TPM, at least 110 TPM, at least 120 TPM, at least 130 TPM, at least 140 TPM, at least 150 TPM, at least 200 TPM, at least 300 TPM, at least 400 TPM, at least 500 TPM, at least 600 TPM, at least 700 TPM, at least 800 TPM, at least 1000 TPM, at least 2000 TPM, at least 3000 TPM, at least 5000 TPM, at least 10⁴ TPM, or greater. In some embodiments, the expression level of the epitope gene in off-target tissues can be at most 1000 TPM, at most 500 TPM, at most 100 TPM, at most 50 TPM, at most 20 TPM, at most 10 TPM, at most 9 TPM, at most 8 TPM, at most 7 TPM, at most 6 TPM, at most 5 TPM, at most 4 TPM, at most 3 TPM, at most 2 TPM, at most 1 TPM, at most 0.9 TPM, at most 0.8 TPM, at most 0.7 TPM, at most 0.6 TPM, at most 0.5 TPM, at most 0.4 TPM, at most 0.3 TPM, at most 0.2 TPM, at most 0.1 TPM, at most 0.050 TPM, at most 0.02 TPM, at most 0.010 TPM, at most 0.005 TPM, at most 0.002 TPM, at most 0.001 TPM, or lower.

[0257] In some embodiments, the methods comprise use of a computer algorithm to screen for tissue-specific epitope genes as provided herein. The computer algorithm can be constructed to access and examine available database containing expression data of a number of genes in different types of tissues. The computer algorithm can also be constructed to extract and compare the expression data as provided by various database, in order to identify genes of interest, e.g., tissue-specific genes, e.g., tissue-specific tumor epitope genes. In some embodiments, the computer algorithm can be constructed to report and display the screening results as can be viewed, extracted, and/or further processed by other computer algorithms. For example, the computer algorithm as provided herein can comprise different modules, among which there is one or more modules for identifying tissue-specific genes as provided herein, and there is also one or more modules for identifying epitope sequences from the identified tissue-specific genes.

[0258] In some embodiments, the methods provided herein comprise identifying an epitope sequence that can bind to or can be predicted to bind to a protein encoded by a MHC allele. In some embodiments, the MHC allele is expressed by a human subject. In some embodiments, the identification of epitope sequence that can bind to or can be predicted to bind to a protein encoded by a MHC allele expressed by a human subject is based on MHC binding affinity prediction, for example by one or more prediction algorithms. In some embodiments, the identification is based on experimental validation as will be discussed below. In some embodiments, the identification is based on both algorithm prediction and experimental validation. In some embodiments, the computer algorithms applicable to the subject matter include, but not limited to, evolutionary algorithms, artificial neural network-based algorithms, algorithms involving ant colony, hidden Markov models, support vector machines, and motif search, and any combination thereof. The computer algorithm can be based on convolutional neural networks (artificial intelligence or deep learning). The algorithms applicable the subject matter can be based on any appropriate prediction models. Non-limiting exemplary affinity prediction programs, tools, or online resources can include NetMHC, NetMHCIIpan, SVRMHC, DeepMHC, BiodMHC, sNebula, MHCPred, EpiToolKit, FRED, NNAlign, ProPred, HLA-DR4Pred, EpiTOP, CTLPred, TEPITOPEpan, SMM-align, ICES, GPS-MBA, EpiJen, PREDIVAC, EpicCapo, Epitopemap, ARB, EpiDOCK, HLArestrictor, MULTIPRED, MHCcluster, IMS (Immunogenetic Management Software), PAAQD, mHC2Pred, TEpredict, TepiTool, MMBPred, MHCMIR, HLAV3D, MHCBench, FDR4, LIGAP, MHC, HLAPred, HLA, POPISK, BiodMHC, MultiRTA, and MHC-BPS.

[0259] In some embodiments, the methods provided herein comprise identifying an epitope sequence that can bind to or can be predicted to bind to a protein encoded by a MHC allele and can be or can be predicted to be presented by an antigen-presenting cell. In some embodiments, the MHC allele is expressed by a human subject. In some embodiments, the antigen-presenting cell is a human antigen-presenting cell. The identification of affinity binding to MHC allele and presentation by APC can be based on prediction algorithms, experimental validation, or both.

### Therapeutic Methods and Compositions

[0260] Provided herein is a therapeutic composition comprising a peptide identified according to the method disclosed herein or a peptide as provided herein. Also provided herein is a method of providing an anti-tumor immunity in a mammal comprising administering to the mammal a polynucleic acid comprising a sequence encoding a peptide identified according to a method described herein. Provided herein is a method of providing an anti-tumor immunity in a mammal comprising administering to the mammal an effective amount of a peptide with a sequence of a peptide identified according to a method described herein. Provided herein is a method of providing an anti-tumor immunity in a mammal comprising administering to the mammal a cell comprising a peptide comprising the sequence of a peptide identified according to a method described herein. Provided herein is a method of providing an anti-tumor immunity in a mammal comprising administering to the mammal a cell comprising a polynucleic acid comprising a sequence encoding a peptide comprising the sequence of peptide identified according to a method described herein. In some embodiments, the cell presents the peptide as an HLA-peptide complex.

[0261] Provided herein is a therapeutic composition comprising a polynucleotide that comprises a sequence coding for a peptide identified according to the method disclosed herein or a peptide as provided herein. Also provided herein is a method of treating a disease or disorder in a subject, the method comprising administering to the subject a polynucleic acid comprising a sequence encoding a peptide identified according to a method described herein or a peptide as provided herein.

[0262] Provided herein is a method of treating a disease or disorder in a subject, the method comprising administering to the subject an effective amount of a peptide comprising the sequence of a peptide identified according to a method described herein or a peptide as provided herein. Provided herein is a method of treating a disease or disorder in a subject, the method comprising administering to the subject a cell comprising a peptide comprising the sequence of a peptide identified according to a method described herein or a peptide as provided herein. Provided herein is a method of treating a disease or disorder in a subject, the method comprising administering to the subject a cell comprising a polynucleic acid comprising a sequence encoding a peptide comprising the sequence of a peptide identified according to a method described herein or a peptide as provided herein. In some embodiments, wherein the disease or disorder is cancer. In some embodiments, the method further comprises administering an immune checkpoint inhibitor to the subject.

[0263] In some embodiments the present invention is directed to a therapeutic or pharmaceutical composition, e.g., a vaccine composition capable of raising a tissue-specific antigen response (e.g., a humoral or cell-mediated immune response). In some embodiments, the pharmaceutical composition comprises antigen therapeutic (e.g., peptides, polynucleotides, TCR, CAR, cells containing TCR or CAR, dendritic cell containing polypeptide, dendritic cell containing polynucleotide, antibody, etc.) described herein corresponding to tissue-specific antigen identified herein.

[0264] In some embodiments, a pharmaceutical composition provided herein comprises at least one antigen specific T cell comprising a T cell receptor (TCR) specific to at least one tissue-specific antigen peptide sequence provided herein. In some embodiments, the T cells are prepared by incubating FMS-like tyrosine kinase 3 receptor ligand (FLT3L) with a population of immune cells from a biological sample and incubating at least one T cell of the biological sample with an APC presenting the at least one tissue-specific antigen peptide sequence.

[0265] A person skilled in the art will be able to select antigenic therapeutics by testing, for example, the generation of T cells in vitro as well as their efficiency and overall presence, the proliferation, affinity and expansion of certain T cells for certain peptides, and the functionality of the T cells, e.g. by analyzing the IFN-γ production or tumor killing by T cells. The most efficient peptides can then combined as an immunogenic composition.

[0266] In some embodiments of the present invention the different antigenic peptides and/or polypeptides are selected so that one pharmaceutical composition comprises antigenic peptides and/or polypeptides capable of associating with different MHC molecules, such as different MHC class I molecule. In some embodiments, a pharmaceutical composition comprises antigenic peptides and/or polypeptides capable of associating with the most frequently occurring MHC class I molecules. Hence, immunogenic compositions described herein comprise different peptides capable of associating with at least 2, at least 3, or at least 4 MHC class I or class II molecules.

[0267] In some embodiments, a pharmaceutical composition described herein is capable of raising a specific cytotoxic T cells response, specific helper T cell response, or a B cell response.

[0268] In some embodiments, a pharmaceutical composition described herein can further comprise an adjuvant and/or a carrier. Examples of useful adjuvants and carriers are given herein below. Polypeptides and/or polynucleotides in the composition can be associated with a carrier such as e.g. a protein or an antigen-presenting cell such as e.g. a dendritic cell (DC) capable of presenting the peptide to a T cell or a B cell. In further embodiments, DC-binding peptides are used as carriers to target the antigenic peptides and polynucleotides encoding the tissue-specific antigen peptides to dendritic cells (Sioud et al. FASEB J 27: 3272-3283 (2013)).

[0269] In embodiments, the antigenic polypeptides or polynucleotides of the present disclosure can be provided as antigen presenting cells (e.g., dendritic cells) containing such polypeptides or polynucleotides. In other embodiments, such antigen presenting cells are used to stimulate T cells for use in patients.

[0270] In some embodiments, the antigen presenting cells are dendritic cells. In related embodiments, the dendritic cells are autologous dendritic cells that are pulsed with the antigenic peptide or nucleic acid. The antigenic peptide can be any suitable peptide that gives rise to an appropriate T cell response. T cell therapy using autologous dendritic cells pulsed with peptides from a tumor associated antigen is disclosed in Murphy et al. (1996) The Prostate 29, 371-380 and Tjua et al. (1997) The Prostate 32, 272-278. In some embodiments, the T cell is a CTL. In some embodiments, the T cell is a HTL.

[0271] Thus, one embodiment of the present invention provides a pharmaceutical composition containing at least one antigen presenting cell (e.g., a dendritic cell) that is pulsed or loaded with one or more antigenic polypeptides or polynucleotides described herein. In embodiments, such APCs are autologous (e.g., autologous dendritic cells). Alternatively, peripheral blood mononuclear cells (PBMCs) isolated from a patient can be loaded with antigenic peptides or polynucleotides ex vivo. In related embodiments, such APCs or PBMCs are injected back into the patient.

[0272] The polynucleotide of the present disclosure can be any suitable polynucleotide that is capable of transducing the dendritic cell, thus resulting in the presentation of a tissue-specific antigenic peptide and induction of immunity. In some embodiments, the polynucleotide can be naked DNA that is taken up by the cells by passive loading. In another embodiment, the polynucleotide is part of a delivery vehicle, for example, a liposome, virus like particle, plasmid, or expression vector. In another embodiment, the polynucleotide is delivered by a vector-free delivery system, for example, high performance electroporation and high-speed cell deformation). In embodiments, such antigen presenting cells (APCs) (e.g., dendritic cells) or peripheral blood mononuclear cells (PBMCs) are used to stimulate a T cell (e.g., an autologous T cell). In related embodiments, the T cell is a CTL. In other related embodiments, the T cell is an HTL. Such T cells are then injected into the patient. In some embodiments, CTL is injected into the patient. In some embodiments, HTL is injected into the patient. In some embodiments, both CTL and HTL are injected into the patient. Administration of either therapeutic can be performed simultaneously or sequentially and in any order.

[0273] In aspects, the present disclosure provides therapeutic compositions comprising immune cells, e.g., T cells that target tissue-specific antigens as provided herein, and methods of generating the compositions. In some embodiments, T cells are stimulated with one or more of the antigens described herein ex vivo. In some embodiments, the T cells that have been induced to recognize and target the tissue-specific antigens ex vivo are infused into the patient. In some embodiments, the infused T cells are from the patient himself/herself. In some embodiments, the infused T cells are from another subject.

[0274] In aspects, the present disclosure provides therapeutic compositions comprising TCRs that target the tissue-specific antigens provided herein and methods for generating the compositions. The TCRs provided herein can recognize one or more specific antigens. For instance, in some cases, the TCRs can be engineered to be bi-specific. In some cases, the TCRs can recognize one particular antigen specifically. In some cases, the TCRs can recognize one particular antigen specifically. In some embodiments, TCRs recognizing one or more of the tissue-specific antigens are identified a priori, for example, from a healthy donor. In some embodiments, the TCR(s) are knocked into T cells from the patient or other subject, e.g., the T cells are genetically modified to express the TCR(s) that are identified as recognizing one or more of the tissue-specific antigens. In some embodiments, the genetically modified T cells are infused into the patient.

[0275] In aspects, the present disclosure provides a method of discovering a TCR that recognizes an epitope, e.g., tissue-specific antigen. In some embodiments, the method comprises obtaining a T cell from a donor, and contacting the T cell with an antigen peptide in complex with an HLA of an APC from the donor. In some embodiments, the contacting can induce proliferation of the T cell. In some embodiments, the method further comprising determining a sequence of a TCR that recognizes the antigen peptide. In some embodiments, the donor is known to have zero or reduced immune tolerance to a tissue of origin of the antigen peptide. Without wishing to be bound to a certain theory, a subject, e.g., a human, can normally develop immune tolerance to proteins or peptides that are encoded by almost all normal genes (e.g., wild-type genes) of the subject in a healthy somatic tissue. However, in some cases, when a tissue of the same species is heterologous to the subject, the subject can have zero or low immune tolerance to proteins or peptides that are normally expressed in such tissue, for instance, a female human being can have low to none immune tolerance to human prostate-specific peptides (e.g., peptides specifically expressed in human prostate), and a male human being can have low to none immune tolerance to human ovary-specific peptides (e.g., peptides specifically expressed in human ovary). In some other cases, when a subject's immune system is deficient in developing immune tolerance to one or more of its own tissues, the subject can also have low to none immune tolerance to peptides specifically expressed in the one or more tissues, for instance, a type I diabetic subject can have autoimmunity against pancreas-specific peptide.

[0276] In some embodiments of the method of TCR discovery provided herein, the donor is a female subject, and the antigen peptide is specific to a tissue selected from the group consisting of: Bulbourethral gland, epididymis, penis, prostate, scrotum, seminal vesicle, testicle. In some embodiments, the donor is a female subject, and the antigen peptide is specific to prostate. In some embodiments, the donor is a male subject, and the antigen peptide is specific to a tissue selected from the group consisting of: Bartholin's gland, fallopian tube, ovary, Skene's gland, uterus, cervix, vagina, and any combination thereof. In some embodiments, the donor is a male subject, and the antigen peptide is specific to ovary. In some embodiments, the TCR discovered by contacting prostate-specific antigen peptide with T cells from female subject can be used for treatment of prostate cancer. In some embodiments, the TCR discovered by contacting ovary-specific antigen peptide with T cells from male subject can be used for treatment of ovarian cancer.

[0277] In some embodiments, the donor is a Type I diabetes patient, and the antigen peptide is specific to pancreas. In some embodiments, the TCR discovered by contacting pancreas-specific antigen peptide with T cells from Type I diabetic subject can be used for treatment of pancreas cancer. In some embodiments, the donor has auto-immune thyroid condition, and the antigen peptide is specific to thyroid. In some embodiments, the TCR discovered by contacting thyroid-specific antigen peptide with T cells from a subject with auto-immune thyroid condition can be used for treatment of thyroid cancer.

[0278] In aspects, the present disclosure provides therapeutic compositions comprising antibodies or functional part thereof that target the tissue-specific antigens provided herein and methods for generating the compositions. The antibodies provided herein can recognize one or more specific antigens. In some cases, the antibody as described herein can recognize one particular antigen specifically. In some embodiments, antibodies provided herein can find particular use for its specific binding to tissue-specific antigens that are expressed on cell surface. In some embodiments, antibodies provided herein can find particular use for its specific binding to tissue-specific antigens that are secreted outside of cells. In some embodiments, the antibodies can be isolated, recombinant, or purified for the therapeutic composition. Production of antibodies or functional part thereof can be carried out by techniques available to one skilled in the art. In some embodiments, antibodies can be produced by hybridomas or by such B cell culture. They can be harvested and for instance used for anticancer therapy. In some embodiments, they can be humanized before use in order to reduce side-effects.

[0279] The pharmaceutical compositions (e.g., immunogenic compositions) described herein for therapeutic treatment are intended for parenteral, topical, nasal, oral or local administration. In some embodiments, the pharmaceutical compositions described herein are administered parenterally, e.g., intravenously, subcutaneously, intradermally, or intramuscularly. In embodiments, the composition can be administered intratumorally. The compositions can be administered at the site of surgical excision to induce a local immune response to the tumor. In some embodiments, described herein are compositions for parenteral administration which comprise a solution of the antigenic peptides and immunogenic compositions are dissolved or suspended in an acceptable carrier, for example, an aqueous carrier. A variety of aqueous carriers can be used, e.g., water, buffered water, 0.9% saline, 0.3% glycine, hyaluronic acid and the like. These compositions can be sterilized by conventional, well known sterilization techniques, or can be sterile filtered. The resulting aqueous solutions can be packaged for use as is, or lyophilized, the lyophilized preparation being combined with a sterile solution prior to administration. The compositions can contain pharmaceutically acceptable auxiliary substances as required to approximate physiological conditions, such as pH adjusting and buffering agents, tonicity adjusting agents, wetting agents and the like, for example, sodium acetate, sodium lactate, sodium chloride, potassium chloride, calcium chloride, sorbitan monolaurate, triethanolamine oleate, etc.

[0280] The concentration of antigenic peptides and polynucleotides described herein in the pharmaceutical formulations can vary widely, i.e., from less than about 0.1%, usually at or at least about 2% to as much as 20% to 50% or more by weight, and will be selected by fluid volumes, viscosities, etc., according to the particular mode of administration selected.

[0281] The antigenic peptides and polynucleotides described herein can also be administered via liposomes, which target the peptides to a particular cells tissue, such as lymphoid tissue. Liposomes are also useful in increasing the half-life of the peptides. Liposomes include emulsions, foams, micelles, insoluble monolayers, liquid crystals, phospholipid dispersions, lamellar layers and the like. In these preparations the peptide to be delivered is incorporated as part of a liposome, alone or in conjunction with a molecule which binds to, e.g., a receptor prevalent among lymphoid cells, such as monoclonal antibodies which bind to the DEC205 antigen, or with other therapeutic or immunogenic compositions. Thus, liposomes filled with a desired peptide or polynucleotide described herein can be directed to the site of lymphoid cells, where the liposomes then deliver the selected therapeutic/immunogenic polypeptide/polynucleotide compositions. Liposomes can be formed from standard vesicle-forming lipids, which generally include neutral and negatively charged phospholipids and a sterol, for example, cholesterol. The selection of lipids is generally guided by consideration of, e.g., liposome size, acid lability and stability of the liposomes in the blood stream. A variety of methods are available for preparing liposomes, as described in, e.g., Szoka et al., Ann. Rev. Biophys. Bioeng. 9; 467 (1980), U.S. Pat. Nos. 4,235,871, 4,501,728, 4,501,728, 4,837,028, and 5,019,369.

[0282] For targeting to the immune cells, an antigenic polypeptides or polynucleotides to be incorporated into the liposome for cell surface determinants of the desired immune system cells. A liposome suspension containing a peptide can be administered intravenously, locally, topically, etc. in a dose which varies according to, inter alia, the manner of administration, the polypeptide or polynucleotide being delivered, and the stage of the disease being treated.

[0283] In some embodiments, antigenic polypeptides and polynucleotides are targeted to dendritic cells. In some embodiments, the antigenic polypeptides and polynucleotides are target to dendritic cells using the markers DEC205, XCR1, CD197, CD80, CD86, CD123, CD209, CD273, CD283, CD289, CD184, CD85h, CD85j, CD85k, CD85d, CD85g, CD85a, TSLP receptor, Clec9a or CD1a.

[0284] For solid compositions, conventional or nanoparticle nontoxic solid carriers can be used which include, for example, pharmaceutical grades of mannitol, lactose, starch, magnesium stearate, sodium saccharin, talcum, cellulose, glucose, sucrose, magnesium carbonate, and the like. For oral administration, a pharmaceutically acceptable nontoxic composition is formed by incorporating any of the normally employed excipients, such as those carriers previously listed, and generally 10-95% of active ingredient, that is, one or more antigenic polypeptides or polynucleotides described herein at a concentration of 25%-75%.

[0285] For aerosol administration, the antigenic polypeptides or polynucleotides can be supplied in finely divided form along with a surfactant and propellant. Representative of such agents are the esters or partial esters of fatty acids containing from 6 to 22 carbon atoms, such as caproic, octanoic, lauric, palmitic, stearic, linoleic, linolenic, olesteric and oleic acids with an aliphatic polyhydric alcohol or its cyclic anhydride. Mixed esters, such as mixed or natural glycerides can be employed. The surfactant can constitute 0.1%-20% by weight of the composition, or 0.25-5%. The balance of the composition can be propellant. A carrier can also be included as desired, as with, e.g., lecithin for intranasal delivery.

[0286] Additional methods for delivering the antigenic polynucleotides described herein are also known in the art. For instance, the nucleic acid can be delivered directly, as “naked DNA”. This approach is described, for instance, in Wolff et al., Science 247: 1465-1468 (1990) as well as U.S. Pat. Nos. 5,580,859 and 5,589,466. The nucleic acids can also be administered using ballistic delivery as described, for instance, in U.S. Pat. No. 5,204,253. Particles comprised solely of DNA can be administered. Alternatively, DNA can be adhered to particles, such as gold particles.

[0287] For therapeutic or immunization purposes, mRNA encoding the antigenic peptides, or peptide binding agents can also be administered to the patient. In some embodiments, the mRNA is self-amplifying RNA. In a further embodiment, the self-amplifying RNA is a part of a synthetic lipid nanoparticle formulation (Geall et al., Proc Natl Acad Sci USA. 109: 14604-14609 (2012)).

[0288] The nucleic acids can also be delivered complexed to cationic compounds, such as cationic lipids. Lipid-mediated gene delivery methods are described, for instance, in WO 96/18372, WO 93/24640; Mannino & Gould-Fogerite, BioTechniques 6(7): 682-691 (1988); U.S. Pat. No. 5,279,833; WO 91/06309; and Felgner et al., Proc. Nat. Acad. Sci. USA 84: 7413-7414 (1987).

[0289] The antigenic peptides and polypeptides described herein can also be expressed by attenuated viruses, such as vaccinia or fowlpox. This approach involves the use of vaccinia virus as a vector to express nucleotide sequences that encode the peptide described herein. Upon introduction into an acutely or chronically infected host or into a noninfected host, the recombinant vaccinia virus expresses the immunogenic peptide, and thereby elicits a host CTL response. Vaccinia vectors and methods useful in immunization protocols are described in, e.g., U.S. Pat. No. 4,722,848. Another vector is BCG (Bacille Calmette Guerin). BCG vectors are described in Stover et al. (Nature 351:456-460 (1991)). A wide variety of other vectors useful for therapeutic administration or immunization of the peptides described herein will be apparent to those skilled in the art from the description herein.

[0290] Adjuvants are any substance whose admixture into the pharmaceutical composition increases or otherwise modifies the immune response to the therapeutic agent. Carriers are scaffold structures, for example a polypeptide or a polysaccharide, to which a tissue-specific antigenic polypeptide or polynucleotide, is capable of being associated. Optionally, adjuvants are conjugated covalently or non-covalently to the polypeptides or polynucleotides described herein.

[0291] The ability of an adjuvant to increase the immune response to an antigen is typically manifested by a significant increase in immune-mediated reaction, or reduction in disease symptoms. For example, an increase in humoral immunity can be manifested by a significant increase in the titer of antibodies raised to the antigen, and an increase in T cell activity can be manifested in increased cell proliferation, or cellular cytotoxicity, or cytokine secretion. An adjuvant can also alter an immune response, for example, by changing a primarily humoral or T helper 2 response into a primarily cellular, or T helper I response.

[0292] Suitable adjuvants are known in the art (see, WO 2015/095811) and include, but are not limited to poly(I:C), poly-ICLC, STING agonist, 1018 ISS, aluminium salts. Amplivax, AS15, BCG, CP-870,893, CpG7909, CyaA, dSLIM, GM-CSF, IC30, IC31, Imiquimod, ImuFact IMP321, IS Patch, ISS, ISCOMATRIX, JuvImmune, LipoVac, MF59, monophosphoryl lipid A, Montanide IMS 1312, Montanide ISA 206. Montanide ISA 50V, Montanide ISA-51, OK-432, OM-174, OM-197-MP-EC, ONTAK, PepTel®, vector system, PLG microparticles, resiquimod, SRL172, virosomes and other virus-like particles. YF-17D, VEGF trap, R848, beta-glucan, Pam3Cys, Pam3CSK4, Aquila's QS21 stimulon (Aquila Biotech, Worcester, Mass., USA) which is derived from saponin, mycobacterial extracts and synthetic bacterial cell wall mimics, and other proprietary adjuvants such as Ribi's Detox. Quil or Superfos. Adjuvants also include incomplete Freund's or GM-CSF. Several immunological adjuvants (e.g., MF59) specific for dendritic cells and their preparation have been described previously (Dupuis M, et al., Cell Immunol. 1998: 186(1):18-27; Allison A C; Dev Biol Stand. 1998; 92:3-11) (Mosca et al. Frontiers in Bioscience, 2007; 12:4050-4060) (Gamvrellis et al. Immunol & Cell Biol. 2004; 82: 506-516). Also cytokines can be used. Several cytokines have been directly linked to influencing dendritic cell migration to lymphoid tissues (e.g., TNF-alpha), accelerating the maturation of dendritic cells into efficient antigen-presenting cells for T-lymphocytes (e.g., GM-CSF, PGE1, PGE2, IL-1, IL-1b, IL-4, IL-6 and CD40L) (U.S. Pat. No. 5,849,589 incorporated herein by reference in its entirety) and acting as immunoadjuvants (e.g., IL-12) (Gabrilovich D I, et al., J Immunother Emphasis Tumor Immunol. 1996 (6):414-418).

[0293] CpG immunostimulatory oligonucleotides have also been reported to enhance the effects of adjuvants in a vaccine setting. Without being bound by theory, CpG oligonucleotides act by activating the innate (non-adaptive) immune system via Toll-like receptors (TLR), mainly TLR9. CpG triggered TLR9 activation enhances antigen-specific humoral and cellular responses to a wide variety of antigens, including peptide or protein antigens, live or killed viruses, dendritic cell immunogenic pharmaceutical compositions, autologous cellular immunogenic pharmaceutical compositions and polysaccharide conjugates in both prophylactic and therapeutic immunogenic pharmaceutical compositions. Importantly, it enhances dendritic cell maturation and differentiation, resulting in enhanced activation of TH1 cells and strong cytotoxic T-lymphocyte (CTL) generation, even in the absence of CD4 T cell help. The TH I bias induced by TLR9 stimulation is maintained even in the presence of adjuvants such as alum or incomplete Freund's adjuvant (IFA) that normally promote a TH2 bias. CpG oligonucleotides show even greater adjuvant activity when formulated or co-administered with other adjuvants or in formulations such as microparticles, nano particles, lipid emulsions or similar formulations, which are especially necessary for inducing a strong response when the antigen is relatively weak. They also accelerate the immune response and enabled the antigen doses to be reduced with comparable antibody responses to the full-dose immunogenic pharmaceutical composition without CpG in some experiments (Arthur M. Krieg, Nature Reviews, Drug Discovery, 5, June 2006, 471-484). U.S. Pat. No. 6,406,705 B1 describes the combined use of CpG oligonucleotides, non-nucleic acid adjuvants and an antigen to induce an antigen-specific immune response. A commercially available CpG TLR9 antagonist is dSLIM (double Stem Loop Immunomodulator) by Mologen (Berlin, GERMANY), which is a component of the pharmaceutical composition described herein. Other TLR binding molecules such as RNA binding TLR 7, TLR 8 and/or TLR 9 can also be used.

[0294] Other examples of useful adjuvants include, but are not limited to, chemically modified CpGs (e.g. CpR, Idera), polyTCLC, Poly(I:C)(e.g. polyi:CI2U), non-CpG bacterial DNA or RNA, ssRNA40 for TLR8, as well as immunoactive small molecules and antibodies such as cyclophosphamide, sunitinib, bevacizumab, celebrex, NCX-4016, sildenafil, tadalafil, vardenafil, sorafinib, XL-999. CP-547632, pazopanib, AZD2171, ipilimumab, tremelimumab, and SC58175, which can act therapeutically and/or as an adjuvant. The amounts and concentrations of adjuvants and additives useful in the context of the present invention can readily be determined by the skilled artisan without undue experimentation. Additional adjuvants include colony-stimulating factors, such as Granulocyte Macrophage Colony Stimulating Factor (GM-CSF, sargramostim).

[0295] In some embodiments, a pharmaceutical composition according to the present invention comprises more than one different adjuvants. Furthermore, the invention encompasses a therapeutic composition comprising any adjuvant substance including any of the above or combinations thereof. It is also contemplated that the antigenic therapeutic (e.g., a humoral or cell-mediated immune response). In some embodiments, the pharmaceutical composition comprises tissue-specific antigen therapeutics (e.g., peptides, polynucleotides, TCR, CAR, cells containing TCR or CAR, dendritic cell containing polypeptide, dendritic cell containing polynucleotide, antibody, etc.) and the adjuvant can be administered separately in any appropriate sequence.

[0296] A carrier can be present independently of an adjuvant. The function of a carrier can for example be to increase the molecular weight of in particular mutant in order to increase their activity or immunogenicity, to confer stability, to increase the biological activity, or to increase serum half-life. Furthermore, a carrier can aid presenting peptides to T cells. The carrier can be any suitable carrier known to the person skilled in the art, for example a protein or an antigen presenting cell. A carrier protein could be but is not limited to keyhole limpet hemocyanin, serum proteins such as transferrin, bovine serum albumin, human serum albumin, thyroglobulin or ovalbumin, immunoglobulins, or hormones, such as insulin or palmitic acid. In some embodiments, the carrier comprises a human fibronection type III domain (Koide et al. Methods Enzymol. 2012; 503:135-56). For immunization of humans, the carrier must be a physiologically acceptable carrier acceptable to humans and safe. However, tetanus toxoid and/or diptheria toxoid are suitable carriers In some embodiments of the invention. Alternatively, the carrier can be dextrans for example sepharose.

[0297] In some embodiments, the polypeptides can be synthesized as multiply linked peptides as an alternative to coupling a polypeptide to a carrier to increase immunogenicity. Such molecules are also known as multiple antigenic peptides (MAPS).

[0298] Tissue-specific antigens as described herein that induce an immune response can be used as a composition when combined with an acceptable carrier or excipient. Such compositions are useful for in vitro or in vivo analysis or for administration to a subject in vivo or ex vivo for treating a subject with a disease.

[0299] Thus, pharmaceutical compositions can include, in addition to active ingredient, a pharmaceutically acceptable excipient, carrier, buffer, stabilizer or other materials well known to those skilled in the art. Such materials should be non-toxic and should not interfere with the efficacy of the active ingredient. The precise nature of the carrier or other material will depend on the route of administration.

[0300] Pharmaceutical formulations comprising a protein of interest, e.g., a tissue-specific antigen described herein, can be prepared for storage by mixing the antigen having the desired degree of purity with optional physiologically acceptable carriers, excipients or stabilizers (Remington's Pharmaceutical Sciences 16th edition, Oslo, A. Ed. (1980)), in the form of lyophilized formulations or aqueous solutions. Acceptable carriers, excipients, or stabilizers are those that are non-toxic to recipients at the dosages and concentrations employed, and include buffers such as phosphate, citrate, and other organic acids; antioxidants including ascorbic acid and methionine; preservatives (such as octadecyldimethylbenzyl ammonium chloride; hexamethonium chloride; benzalkonium chloride, benzethonium chloride; phenol, butyl or benzyl alcohol; alkyl parabens such as methyl or propyl paraben; catechol; resorcinol; cyclohexanol; 3-pentanol; and m-cresol); low molecular weight (less than about 10 residues) polypeptides; proteins, such as serum albumin, gelatin, or immunoglobulins; hydrophilic polymers such as polyvinylpyrrolidone; amino acids such as glycine, glutamine, asparagine, histidine, arginine, or lysine; monosaccharides, disaccharides, and other carbohydrates including glucose, mannose, or dextrins; chelating agents such as EDTA; sugars such as sucrose, mannitol, trehalose or sorbitol; salt-forming counter-ions such as sodium; metal complexes (e.g., Zn-protein complexes); and/or non-ionic surfactants such as TWEEN®, PLURONICS® or polyethylene glycol (PEG).

[0301] Acceptable carriers are physiologically acceptable to the administered patient and retain the therapeutic properties of the compounds with/in which it is administered. Acceptable carriers and their formulations are generally described in, for example, Remington' pharmaceutical Sciences (18th Edition, ed. A. Gennaro, Mack Publishing Co., Easton, PA 1990). One exemplary carrier is physiological saline. A pharmaceutically acceptable carrier is a pharmaceutically acceptable material, composition or vehicle, such as a liquid or solid filler, diluent, excipient, solvent or encapsulating material, involved in carrying or transporting the subject compounds from the administration site of one organ, or portion of the body, to another organ, or portion of the body, or in an in vitro assay system. Acceptable carriers are compatible with the other ingredients of the formulation and not injurious to a subject to whom it is administered. Nor should an acceptable carrier alter the specific activity of the tissue-specific antigens.

[0302] In one aspect, provided herein are pharmaceutically acceptable or physiologically acceptable compositions including solvents (aqueous or non-aqueous), solutions, emulsions, dispersion media, coatings, isotonic and absorption promoting or delaying agents, compatible with pharmaceutical administration. Pharmaceutical compositions or pharmaceutical formulations therefore refer to a composition suitable for pharmaceutical use in a subject. The pharmaceutical compositions and formulations include an amount of a tissue-specific antigen as provided herein (or polynucleotide encoding the tissue-specific antigen) and a pharmaceutically or physiologically acceptable carrier. Compositions can be formulated to be compatible with a particular route of administration (i.e., systemic or local). Thus, compositions include carriers, diluents, or excipients suitable for administration by various routes.

[0303] In some embodiments, a composition further comprises an acceptable additive in order to improve the stability of the tissue-specific antigen in the composition and/or to control the release rate of the composition. Acceptable additives do not alter the specific activity of the tissue-specific antigens. Exemplary acceptable additives include, but are not limited to, a sugar such as mannitol, sorbitol, glucose, xylitol, trehalose, sorbose, sucrose, galactose, dextran, dextrose, fructose, lactose and mixtures thereof. Acceptable additives can be combined with acceptable carriers and/or excipients such as dextrose. Alternatively, exemplary acceptable additives include, but are not limited to, a surfactant such as polysorbate 20 or polysorbate 80 to increase stability of the peptide and decrease gelling of the solution. The surfactant can be added to the composition in an amount of 0.01% to 5% of the solution. Addition of such acceptable additives increases the stability and half-life of the composition in storage.

[0304] The pharmaceutical composition can be administered, for example, by injection. Compositions for injection include aqueous solutions (where water soluble) or dispersions and sterile powders for the extemporaneous preparation of sterile injectable solutions or dispersion. For intravenous administration, suitable carriers include physiological saline, bacteriostatic water, or phosphate buffered saline (PBS). The carrier can be a solvent or dispersion medium containing, for example, water, ethanol, polyol (for example, glycerol, propylene glycol, and liquid polyethylene glycol, and the like), and suitable mixtures thereof. Fluidity can be maintained, for example, by the use of a coating such as lecithin, by the maintenance of the required particle size in the case of dispersion and by the use of surfactants. Antibacterial and antifungal agents include, for example, parabens, chlorobutanol, phenol, ascorbic acid and thimerosal. Isotonic agents, for example, sugars, polyalcohols such as manitol, sorbitol, and sodium chloride can be included in the composition. The resulting solutions can be packaged for use as is, or lyophilized: the lyophilized preparation can later be combined with a sterile solution prior to administration. For intravenous, injection, or injection at the site of affliction, the active ingredient will be in the form of a parenterally acceptable aqueous solution which is pyrogen-free and has suitable pH, isotonicity and stability. Those of relevant skill in the art are well able to prepare suitable solutions using, for example, isotonic vehicles such as Sodium Chloride Injection, Ringer's Injection, Lactated Ringer's Injection. Preservatives, stabilizers, buffers, antioxidants and/or other additives can be included, as needed. Sterile injectable solutions can be prepared by incorporating an active ingredient in the required amount in an appropriate solvent with one or a combination of ingredients enumerated above, as required, followed by filtered sterilization. Generally, dispersions are prepared by incorporating the active ingredient into a sterile vehicle which contains a basic dispersion medium and the required other ingredients from those enumerated above. In the case of sterile powders for the preparation of sterile injectable solutions, the preferred methods of preparation are vacuum drying and freeze drying which yields a powder of the active ingredient plus any additional desired ingredient from a previously sterile-filtered solution thereof.

[0305] Compositions can be conventionally administered intravenously, such as by injection of a unit dose, for example. For injection, an active ingredient can be in the form of a parenterally acceptable aqueous solution which is substantially pyrogen-free and has suitable pH, isotonicity and stability. One can prepare suitable solutions using, for example, isotonic vehicles such as Sodium Chloride Injection, Ringer's Injection, Lactated Ringer's Injection. Preservatives, stabilizers, buffers, antioxidants and/or other additives can be included, as required. Additionally, compositions can be administered via aerosolization.

[0306] In some embodiments, the composition is lyophilized, for example, to increase shelf-life in storage. When the compositions are considered for use in medicaments or any of the methods provided herein, it is contemplated that the composition can be substantially free of pyrogens such that the composition will not cause an inflammatory reaction or an unsafe allergic reaction when administered to a human patient. Testing compositions for pyrogens and preparing compositions substantially free of pyrogens are well understood to one or ordinary skill of the art and can be accomplished using commercially available kits.

[0307] Acceptable carriers can contain a compound that stabilizes, increases or delays absorption, or increases or delays clearance. Such compounds include, for example, carbohydrates, such as glucose, sucrose, or dextrans; low molecular weight proteins: compositions that reduce the clearance or hydrolysis of peptides; or excipients or other stabilizers and/or buffers. Agents that delay absorption include, for example, aluminum monostearate and gelatin. Detergents can also be used to stabilize or to increase or decrease the absorption of the pharmaceutical composition, including liposomal carriers. To protect from digestion the compound can be complexed with a composition to render it resistant to acidic and enzymatic hydrolysis, or the compound can be complexed in an appropriately resistant carrier such as a liposome.

[0308] The compositions can be administered in a manner compatible with the dosage formulation, and in a therapeutically effective amount. The quantity to be administered depends on the subject to be treated, capacity of the subject's immune system to utilize the active ingredient, and degree of binding capacity desired. Precise amounts of active ingredient required to be administered depend on the judgment of the practitioner and are peculiar to each individual. Suitable regimes for initial administration and booster shots arc also variable, but are typified by an initial administration followed by repeated doses at one or more hour intervals by a subsequent injection or other administration. Alternatively, continuous intravenous infusions sufficient to maintain concentrations in the blood are contemplated.

[0309] Peptide-based immunogenic pharmaceutical compositions can be formulated using any of the well-known techniques, carriers, and excipients as suitable and as understood in the art. The polypeptides can be a cocktail of multiple polypeptides containing the same sequence, or a cocktail of multiple copies of different polypeptides. The peptides can be modified, such as for example by lipidation, or attachment to a carrier protein. Lipidation can be the covalent attachment of a lipid group to a polypeptide. Lipidated peptides, or lipidated polypeptides, can stabilize structures and can enhance efficacy of the treatment.

[0310] Lipidation can be classified into several different types, such as N-myristoylation, palmitoylation, GPI-anchor addition, prenylation, and several additional types of modifications. N-myristoylation is the covalent attachment of myristate, a C14 saturated acid, to a glycine residue. Palmitoylation is thioester linkage of long-chain fatty acids (C16) to cysteine residues. GPI-anchor addition is glycosyl-phosphatidylinositol (GPI) linkage via amide bond. Prenylation is the thioether linkage of an isoprenoid lipid (e.g. farnesyl (C-15), geranylgeranyl (C-20)) to cysteine residues. Additional types of modifications can include attachment of S-diacylglycerol by a sulfur atom of cysteines, O-octanoyl conjugation via serine or threonine residues, S-archaeol conjugation to cysteine residues, and cholesterol attachment.

[0311] Fatty acids for generating a lipidated peptides can include C2 to C30 saturated, monounsaturated, or polyunsaturated fatty acyl groups. Exemplary fatty acids can include palmitoyl, myristoyl, stearoyl and decanoyl groups. In some instances, a lipid moiety that has adjuvant property is attached to a polypeptide of interest to elicit or enhance immunogenicity in the absence of an extrinsic adjuvant. A lipidated peptide or lipopeptide can be referred to as a self-adjuvant lipopeptide. Any of the fatty acids described above and elsewhere herein can elicit or enhance immunogenicity of a polypeptide of interest. A fatty acid that can elicit or enhance immunogenicity can include palmitoyl, myristoyl, stearoyl, lauroyl, octanoyl, and decanoyl groups.

[0312] Polypeptides such as naked peptides or lipidated peptides can be incorporated into a liposome. Sometimes, lipidated peptides can be incorporated into a liposome. For example, the lipid portion of the lipidated peptide can spontaneously integrate into the lipid bilayer of a liposome. Thus, a lipopeptide can be presented on the “surface” of a liposome.

[0313] Exemplary liposomes suitable for incorporation in the formulations include, and are not limited to, multilamellar vesicles (MLV), oligolamellar vesicles (OLV), unilamellar vesicles (UV), small unilamellar vesicles (SUV), medium-sized unilamellar vesicles (MUV), large unilamellar vesicles (LUV), giant unilamellar vesicles (GUV), multivesicular vesicles (MVV), single or oligolamellar vesicles made by reverse-phase evaporation method (REV), multilamellar vesicles made by the reverse-phase evaporation method (MLV-REV), stable plurilamellar vesicles (SPLV), frozen and thawed MLV (FATMLV), vesicles prepared by extrusion methods (VET), vesicles prepared by French press (FPV), vesicles prepared by fusion (FUV), dehydration-rehydration vesicles (DRV), and bubblesomes (BSV).

[0314] Depending on the method of preparation, liposomes can be unilamellar or multilamellar, and can vary in size with diameters ranging from about 0.02 μm to greater than about 10 μm. Liposomes can adsorb many types of cells and then release an incorporated agent (e.g., a peptide described herein). In some cases, the liposomes fuse with the target cell, whereby the contents of the liposome then empty into the target cell. A liposome can be endocytosed by cells that are phagocytic. Endocytosis can be followed by intralysosomal degradation of liposomal lipids and release of the encapsulated agents.

[0315] The liposomes provided herein can also comprise carrier lipids. In some embodiments the carrier lipids are phospholipids. Carrier lipids capable of forming liposomes include, but are not limited to dipalmitoylphosphatidylcholine (DPPC), phosphatidylcholine (PC; lecithin), phosphatidic acid (PA), phosphatidylglycerol (PG), phosphatidylethanolamine (PE), phosphatidylserine (PS). Other suitable phospholipids further include distearoylphosphatidylcholine (DSPC), dimyristoylphosphatidylcholine (DMPC), dipalmitoylphosphatidyglycerol (DPPG), distearoylphosphatidyglycerol (DSPG), dimyristoylphosphatidylglycerol (DMPG), dipalmitoylphosphatidic acid (DPPA); dimyristoylphosphatidic acid (DMPA), distearoylphosphatidic acid (DSPA), dipalmitoylphosphatidylserine (DPPS), dimyristoylphosphatidylserine (DMPS), distearoylphosphatidylserine (DSPS), dipalmitoylphosphatidyethanolamine (DPPE), dimyristoylphosphatidylethanolamine (DMPE), distearoylphosphatidylethanolamine (DSPE) and the like, or combinations thereof. In some embodiments, the liposomes further comprise a sterol (e.g., cholesterol) which modulates liposome formation. The carrier lipids can be any known non-phosphate polar lipids.

[0316] A pharmaceutical composition can be encapsulated within liposomes using well-known technology. Biodegradable microspheres can also be employed as carriers for the pharmaceutical compositions of this invention.

[0317] The pharmaceutical composition can be administered in liposomes or microspheres (or microparticles). Methods for preparing liposomes and microspheres for administration to a patient are well known to those of skill in the art. Essentially, material is dissolved in an aqueous solution, the appropriate phospholipids and lipids added, along with surfactants if required, and the material dialyzed or sonicated, as necessary.

[0318] Microspheres formed of polymers or proteins are well known to those skilled in the art, and can be tailored for passage through the gastrointestinal tract directly into the blood stream. Alternatively, the compound can be incorporated and the microspheres, or composite of microspheres, implanted for slow release over a period of time ranging from days to months.

[0319] A polypeptide can also be attached to a carrier protein for delivery. The carrier protein can be an immunogenic carrier element and can be attached by any recombinant technology. Exemplary carrier proteins include Mariculture keyhole limpet hemocyanin (mcKLH), PEGylated mcKLH, Blue Carrier* Proteins, bovine serum albumin (BSA), cationized BSA, ovalbumin, and bacterial proteins such as tetanus toxoid (TT).

[0320] A polypeptide can also be prepared as multiple antigenic peptides (MAPs). Peptides may be attached at the N-terminus or the C-terminus to small non-immunogenic cores. Peptides built upon this core can offer highly localized peptide density. The core can be a dendritic core residue or matrix composed of bifunctional units. Suitable core molecules for constructing MAPs can include ammonia, ethylenediamine, aspartic acid, glutamic acid, and lysine. For example, a lysine core molecule can be attached via peptide bonds through each of its amino groups to two additional lysines.

[0321] A polypeptide can be chemically synthesized, or recombinantly expressed in a cell system or a cell-free system. A peptide can be synthesized, such as by a liquid-phase synthesis, a solid-phase synthesis, or by microwave assisted peptide synthesis. A polypeptide can be modified, such as for example, by acylation, alkylation, amidation, arginylation, polyglutamylation, polyglycylation, butyrylation, gamma-carboxylation, glycosylation, malonylation, hydroxylation, iodination, nucleotide addition (e.g. ADP-ribosylation), oxidation, phosphorylation, adenylylation, propionylation, S-glutathionylation, S-nitrosylation, succinylation, sulfation, glycation, palmitoylation, myristoylation, isoprenylation or prenylation (e.g. farnesylation or geranylgeranylation), glypiation, lipoylation, attachement of flavin moiety (e.g. FMN or FAD), attachment of heme C, phosphopantetheinylation, retinylidene Schiff base formation, diphthamide formation, ethanolamine phosphoglycerol attachment, hypusine formuation, biotinylation, pegylation, ISGylation, SUMUylation, ubiquitination, Neddylation, Pupylation, citrullination, deamidation, eliminylation, carbamylation, or a combination thereof.

[0322] After generation of a polypeptide, the polypeptide can be subjected to one or more rounds of purification steps to remove impurities. The purification step can be a chromatographic step utilizing separation methods such as affinity-based, size-exclusion based, ion-exchange based, or the like. In some cases, the polypeptide is at most 30%, 40%, 50%, 60%, 70%, 80%, 90%, 95%, 99%, 99.9%, or 100% pure or without the presence of impurities. In some cases, the polypeptide is at least 30%, 40%, 50%, 60%, 70%, 80%, 90%, 95%, 99%, 99.9%, or 100% pure or without the presence of impurities.

[0323] A polypeptide can include natural amino acids, unnatural amino acids, or a combination thereof. An amino acid residue can refer to a molecule containing both an amino group and a carboxyl group. Suitable amino acids include, without limitation, both the D- and L-isomers of the naturally-occurring amino acids, as well as non-naturally occurring amino acids prepared by organic synthesis or other metabolic routes. The term amino acid, as used herein, includes, without limitation, α-amino acids, natural amino acids, non-natural amino acids, and amino acid analogs.

[0324] The term “α-amino acid” can refer to a molecule containing both an amino group and a carboxyl group bound to a carbon which is designated the a-carbon.

[0325] The term “β-amino acid” can refer to a molecule containing both an amino group and a carboxyl group in a p configuration.

[0326] “Naturally occurring amino acid” can refer to anyone of the twenty amino acids commonly found in peptides synthesized in nature, and known by the one letter abbreviations A, R, N, C, D, Q, E, G, H, I, L, K, M, F, P, S, T, W, Y and V. A table showing a summary of the properties of natural amino acids can be found, e.g., in U.S. Patent Application Publication No. 20130123169, which is herein incorporated by reference.

[0327] A peptide provided herein can comprise one or more hydrophobic, polar, or charged amino acids. “Hydrophobic amino acids” include small hydrophobic amino acids and large hydrophobic amino acids. “Small hydrophobic amino acid” can be glycine, alanine, proline, and analogs thereof. “Large hydrophobic amino acids” can be valine, leucine, isoleucine, phenylalanine, methionine, tryptophan, and analogs thereof. “Polar amino acids” can be serine, threonine, asparagine, glutamine, cysteine, tyrosine, and analogs thereof. “Charged amino acids” can be lysine, arginine, histidine, aspartate, glutamate, and analogs thereof.

[0328] A peptide provided herein can comprise one or more amino acid analogs. An “amino acid analog” can be a molecule which is structurally similar to an amino acid and which can be substituted for an amino acid in the formation of a peptidomimetic macrocycle Amino acid analogs include, without limitation, β-amino acids and amino acids where the amino or carboxy group is substituted by a similarly reactive group (e.g., substitution of the primary amine with a secondary or tertiary amine, or substitution of the carboxy group with an ester).

[0329] A peptide provided herein can comprises one or more non-natural amino acids. A “non-natural amino acid” can be an amino acid which is not one of the twenty amino acids commonly found in peptides synthesized in nature, and known by the one letter abbreviations A, R, N, C, D, Q, E, G, H, I, L, K, M, F, P, S, T, W, Y and V. Non-natural amino acids or amino acid analogs include structures disclosed, e.g., in U.S. Patent Application Publication No. 20130123169, which is herein incorporated by reference.

[0330] Amino acid analogs can include β-amino acid analogs. Examples of β-amino acid analogs and analogs of alanine, valine, glycine, leucine, arginine, lysine, aspartic acids, glutamic acids, cysteine, methionine, phenylalanine, tyrosine, proline, serine, threonine, and tryptophan can include structures disclosed, e.g., in U.S. Patent Application Publication No. 20130123169, which is herein incorporated by reference.

[0331] Amino acid analogs can be racemic. In some instances, the D isomer of the amino acid analog is used. In some cases, the L isomer of the amino acid analog is used. In some instances, the amino acid analog comprises chiral centers that are in the R or S configuration. Sometimes, the amino group(s) of a β-amino acid analog is substituted with a protecting group, e.g., tert-butyloxycarbonyl (BOC group), 9-fluorenylmethyloxycarbonyl (FMOC), tosyl, and the like. Sometimes, the carboxylic acid functional group of a P-amino acid analog is protected, e.g., as its ester derivative. In some cases, the salt of the amino acid analog is used.

[0332] A “non-essential” amino acid residue can be a residue that can be altered from the wild-type sequence of a polypeptide without abolishing or substantially altering its essential biological or biochemical activity (e.g., receptor binding or activation). An “essential” amino acid residue can be a residue that, when altered from the wild-type sequence of the polypeptide, results in abolishing or substantially abolishing the polypeptide's essential biological or biochemical activity.

[0333] A “conservative amino acid substitution” can be one in which the amino acid residue is replaced with an amino acid residue having a similar side chain. Families of amino acid residues having similar side chains have been defined in the art. These families can include amino acids with basic side chains (e.g., K, R, H), acidic side chains (e.g., D, E), uncharged polar side chains (e.g., G. N, Q, S, T, Y, C), nonpolar side chains (e.g., A, V, L, I, P, F, M, W), beta-branched side chains (e.g., T, V,) and aromatic side chains (e.g., Y, F, W, H). Thus, a predicted nonessential amino acid residue in a polypeptide, for example, can be replaced with another amino acid residue from the same side chain family. Other examples of acceptable substitutions can be substitutions based on isosteric considerations (e.g. norleucine for methionine) or other properties (e.g. 2-thienylalanine for phenylalanine, or 6-Cl-tryptophan for tryptophan).

[0334] Nucleic acid-based immunogenic pharmaceutical compositions can also be administered to a subject. Nucleic acid-based immunogenic pharmaceutical compositions can be formulated using any of the well-known techniques, carriers, and excipients as suitable and as understood in the art. The nucleic acid can be DNA, genomic DNA or cDNA, RNA, or a hybrid, where the nucleic acid may contain combinations of deoxyribo- and ribo-nucleotides, and combinations of bases including uracil, adenine, thymine, cytosine, guanine, inosine, xanthine hypoxanthine, isocytosine and isoguanine. Nucleic acids can be obtained by chemical synthesis methods or by recombinant methods. The immunogenic pharmaceutical composition can be a DNA-based immunogenic pharmaceutical composition, an RNA-based immunogenic pharmaceutical composition, a hybrid DNA/RNA based immunogenic pharmaceutical composition, or a hybrid nucleic acid/peptide based immunogenic pharmaceutical composition. The peptide can be a peptide derived from a peptide in Table 1A, Table 1B, Table 1C or Table 2, a peptide that has a sequence that is at least 40%, 50%, 60%, 70%, 80%, 90%, 95%, or more in sequence homology to a peptide in Table 1A, Table 1B, Table 1C or Table 2, or a peptide that has a sequence that is at most 40%, 50%, 60%, 70%, 80%, 90%, 95%, or less in sequence homology to a peptide in Table 1A, Table 1B, Table 1C or Table 2.

[0335] A nucleic acid described herein can contain phosphodiester bonds, although in some cases, as outlined below (for example in the construction of primers and probes such as label probes), nucleic acid analogs are included that can have alternate backbones, comprising, for example, phosphoramide, phosphorothioate, O-methylphosphoroamidite linkages, and peptide nucleic acid backbones and linkages. Other analog nucleic acids include those with bicyclic structures including locked nucleic acids, positive backbones and non-ribose backbones. Nucleic acids containing one or more carbocyclic sugars are also included within the definition of nucleic acids. Locked nucleic acids (LNAs) are also included within the definition of nucleic acid analogs. LNAs are a class of nucleic acid analogues in which the ribose ring is “locked” by a methylene bridge connecting the 2′-0 atom with the 4′-C atom. These modifications of the ribose-phosphate backbone can be done to increase the stability and half-life of such molecules in physiological environments. For example, PNA:DNA and LNA-DNA hybrids can exhibit higher stability and thus can be used in some embodiments. The nucleic acids can be single stranded or double stranded, as specified, or contain portions of both double stranded or single stranded sequence. Depending on the application, the nucleic acids can be DNA (including, e.g., genomic DNA, mitochondrial DNA, and cDNA), RNA (including, e.g., mRNA and rRNA) or a hybrid, where the nucleic acid contains any combination of deoxyribose- and ribo-nucleotides, and any combination of bases, including uracil, adenine, thymine, cytosine, guanine, inosine, xathanine hypoxathanine, isocytosine, isoguanine, etc.

[0336] A nucleic acid-based immunogenic pharmaceutical compositions can be in the form of a vector. A vector can be a circular plasmid or a linear nucleic acid. A circular plasmid or linear nucleic acid can be capable of directing expression of a particular nucleotide sequence in an appropriate subject cell. A vector can have a promoter operably linked to the polypeptide-encoding nucleotide sequence, which can be operably linked to termination signals. A vector can contain sequences required for proper translation of the nucleotide sequence. The vector comprising the nucleotide sequence of interest can be chimeric, meaning that at least one of its components can be heterologous with respect to at least one of its other components. The expression of the nucleotide sequence in an expression cassette can be under the control of a constitutive promoter or of an inducible promoter, which can initiate transcription only when the host cell is exposed to some particular internal or external stimulus.

[0337] The vector can be a plasmid. A plasmid can be useful for transfecting cells with nucleic acid encoding the polypeptide, and the transformed host cells can be cultured and maintained under conditions wherein expression of the polypeptide takes place.

[0338] A plasmid can comprise a nucleic acid sequence that encodes one or more of the various polypeptides disclosed herein. A single plasmid can contain coding sequence for a single polypeptide, or coding sequence for more than one polypeptide. Sometimes, the plasmid can further comprise coding sequence that encodes an adjuvant, such as an immune stimulating molecule, such as a cytokine.

[0339] A plasmid can further comprise an initiation codon, which can be upstream of the coding sequence, and a stop codon, which can be downstream of the coding sequence. The initiation and termination codon can be in frame with the coding sequence. A plasmid can also comprise a promoter that is operably linked to the coding sequence, and an enhancer upstream of the coding sequence. The enhancer can be human actin, human myosin, human hemoglobin, human muscle creatine or a viral enhancer such as one from CMV, FMDV, RSV or EBV.

[0340] A plasmid can also comprise a mammalian origin of replication in order to maintain the plasmid extrachromosomally and produce multiple copies of the plasmid in a cell. A plasmid can also comprise a regulatory sequence, which can be well suited for gene expression in a cell into which the plasmid is administered. The coding sequence can comprise a codon that can allow more efficient transcription of the coding sequence in the host cell.

[0341] The nucleic acid based immunogenic pharmaceutical compositions can also be a linear nucleic acid immunogenic pharmaceutical composition, or linear expression cassette, that is capable of being efficiently delivered to a subject via electroporation and expressing one or more polypeptides disclosed herein.

[0342] Cell-based immunogenic pharmaceutical compositions can also be administered to a subject. For example, an antigen presenting cell (APC) based immunogenic pharmaceutical composition can be formulated using any of the well-known techniques, carriers, and excipients as suitable and as understood in the art. APCs include monocytes, monocyte-derived cells, macrophages, and dendritic cells. Sometimes, an APC based immunogenic pharmaceutical composition can be a dendritic cell-based immunogenic pharmaceutical composition.

[0343] A dendritic cell-based immunogenic pharmaceutical composition can be prepared by any methods well known in the art. In some cases, dendritic cell-based immunogenic pharmaceutical compositions can be prepared through an ex vivo or in vivo method. The ex vivo method can comprise the use of autologous DCs pulsed ex vivo with the polypeptides described herein, to activate or load the DCs prior to administration into the patient. The in vivo method can comprise targeting specific DC receptors using antibodies coupled with the polypeptides described herein. The DC-based immunogenic pharmaceutical composition can further comprise DC activators such as TLR3, TLR-7-8, and CD40 agonists. The DC-based immunogenic pharmaceutical composition can further comprise adjuvants, and a pharmaceutically acceptable carrier.

[0344] An adjuvant can be used to enhance the immune response (humoral and/or cellular) elicited in a patient receiving the immunogenic pharmaceutical composition. Sometimes, adjuvants can elicit a Th1-type response. Other times, adjuvants can elicit a Th2-type response. A Th1-type response can be characterized by the production of cytokines such as IFN-γ as opposed to a Th2-type response which can be characterized by the production of cytokines such as IL-4, IL-5 and IL-10.

[0345] In some aspects, lipid-based adjuvants, such as MPLA and MDP, can be used with the immunogenic pharmaceutical compositions disclosed herein. Monophosphoryl lipid A (MPLA), for example, is an adjuvant that causes increased presentation of liposomal antigen to specific T Lymphocytes. In addition, a muramyl dipeptide (MDP) can also be used as a suitable adjuvant in conjunction with the immunogenic pharmaceutical formulations described herein.

[0346] Adjuvant can also comprise stimulatory molecules such as cytokines. Non-limiting examples of cytokines include: CCL20, a-interferon (IFN-a), β-interferon (IFN-β), γ-interferon, platelet derived growth factor (PDGF), TNFa, TNFp, GM-CSF, epidermal growth factor (EGF), cutaneous T cell-attracting chemokine (CTACK), epithelial thymus-expressed chemokine (TECK), mucosae-associated epithelial chemokine (MEC), IL-12, IL-15, IL-28, MHC, CD80, CD86, IL-1, IL-2, IL-4, IL-5, IL-6, IL-10, IL-18, MCP-1, MIP-1a, MIP-1-, IL-8, L-selectin, P-selectin, E-selectin, CD34, GlyCAM-1, MadCAM-1, LFA-1, VLA-1, Mac-1, pl50.95, PECAM, ICAM-1, ICAM-2, ICAM-3, CD2, LFA-3, M-CSF, G-CSF, mutant forms of IL-18, CD40, CD40L, vascular growth factor, fibroblast growth factor, IL-7, nerve growth factor, vascular endothelial growth factor, Fas, TNF receptor, Fit, Apo-1, p55, WSL-1, DR3, TRAMP, Apo-3, AIR, LARD, NGRF, DR4, DRS, KILLER, TRAIL-R2, TRICK2, DR6, Caspase ICE, Fos, c-jun, Sp-1, Ap-1, Ap-2, p38, p65Rel, MyD88, IRAK, TRAF6, IkB, Inactive NIK, SAP K. SAP-I, JNK, interferon response genes, NFkB, Bax, TRAIL, TRAILrec, TRAILrecDRC5, TRAIL-R3, TRAIL-R4, RANK, RANK LIGAND, Ox40, Ox40 LIGAND, NKG2D, MICA, MICB, NKG2A, NKG2B, NKG2C, NKG2E, NKG2F. TAP1, and TAP2.

[0347] Additional adjuvants include: MCP-1, MIP-1a, MIP-1p, IL-8, RANTES, L-selectin, P-selectin, E-selectin, CD34, GlyCAM-1, MadCAM-1, LFA-1, VLA-1, Mac-1, p150.95, PECAM, ICAM-1, ICAM-2, ICAM-3, CD2, LFA-3, M-CSF, G-CSF, IL-4, mutant forms of IL-18, CD40, CD40L, vascular growth factor, fibroblast growth factor, IL-7, IL-22, nerve growth factor, vascular endothelial growth factor, Fas, TNF receptor, Fit, Apo-l, p55, WSL-1, DR3, TRAMP, Apo-3. AIR, LARD, NGRF, DR4, DRS, KILLER, TRAIL-R2, TRICK2, DR6, Caspase ICE, Fos, c-jun, Sp-1, Ap-l, Ap-2, p38, p65Rel, MyD88, IRAK, TRAF6, IkB, Inactive NIK, SAP K, SAP-1, JNK, interferon response genes, NFkB, Bax, TRAIL, TRAILrec, TRAILrecDRC5. TRAIL-R3, TRAIL-R4, RANK, RANK LIGAND, Ox40, Ox40 LIGAND, NKG2D, MICA, MICB, NKG2A, NKG2B, NKG2C, NKG2E, NKG2F, TAP1, TAP2 and functional fragments thereof.

[0348] In some aspects, an adjuvant can be a modulator of a toll like receptor. Examples of modulators of toll-like receptors include TLR-9 agonists and are not limited to small molecule modulators of toll-like receptors such as Imiquimod. Other examples of adjuvants that are used in combination with an immunogenic pharmaceutical composition described herein can include and are not limited to saponin, CpG ODN and the like. Sometimes, an adjuvant is selected from bacteria toxoids, polyoxypropylene-polyoxyethylene block polymers, aluminum salts, liposomes, CpG polymers, oil-in-water emulsions, or a combination thereof. Sometimes, an adjuvant is an oil-in-water emulsion. The oil-in-water emulsion can include at least one oil and at least one surfactant, with the oil(s) and surfactant(s) being biodegradable (metabolisable) and biocompatible. The oil droplets in the emulsion can be less than 5 μm in diameter, and can even have a sub-micron diameter, with these small sizes being achieved with a microfluidiser to provide stable emulsions. Droplets with a size less than 220 nm can be subjected to filter sterilization.

[0349] In some instances, an immunogenic pharmaceutical composition can include carriers and excipients (including but not limited to buffers, carbohydrates, mannitol, proteins, polypeptides or amino acids such as glycine, antioxidants, bacteriostats, chelating agents, suspending agents, thickening agents and/or preservatives), water, oils including those of petroleum, animal, vegetable or synthetic origin, such as peanut oil, soybean oil, mineral oil, sesame oil and the like, saline solutions, aqueous dextrose and glycerol solutions, flavoring agents, coloring agents, detackifiers and other acceptable additives, adjuvants, or binders, other pharmaceutically acceptable auxiliary substances as required to approximate physiological conditions, such as pH buffering agents, tonicity adjusting agents, emulsifying agents, wetting agents and the like. Examples of excipients include starch, glucose, lactose, sucrose, gelatin, malt, rice, flour, chalk, silica gel, sodium stearate, glycerol monostearate, talc, sodium chloride, dried skim milk, glycerol, propylene, glycol, water, ethanol and the like. In another instances, the pharmaceutical preparation is substantially free of preservatives. In other instances, the pharmaceutical preparation can contain at least one preservative. It will be recognized that, while any suitable carrier known to those of ordinary skill in the art can be employed to administer the pharmaceutical compositions described herein, the type of carrier will vary depending on the mode of administration.

[0350] An immunogenic pharmaceutical composition can include preservatives such as thiomersal or 2-phenoxyethanol. In some instances, the immunogenic pharmaceutical composition is substantially free from (e.g. <10 μg/ml) mercurial material e.g. thiomersal-free, α-Tocopherol succinate may be used as an alternative to mercurial compounds.

[0351] For controlling the tonicity, a physiological salt such as sodium salt can be included in the immunogenic pharmaceutical composition. Other salts can include potassium chloride, potassium dihydrogen phosphate, disodium phosphate, and/or magnesium chloride, or the like.

[0352] An immunogenic pharmaceutical composition can have an osmolality of between 200 mOsm/kg and 400 mOsm/kg, between 240-360 mOsm/kg, or within the range of 290-310 mOsm/kg.

[0353] An immunogenic pharmaceutical composition can comprise one or more buffers, such as a Tris buffer; a borate buffer; a succinate buffer; a histidine buffer (particularly with an aluminum hydroxide adjuvant): or a citrate buffer. Buffers, in some cases, are included in the 5-20 mM range.

[0354] The pH of the immunogenic pharmaceutical composition can be between about 5.0 and about 8.5, between about 6.0 and about 8.0, between about 6.5 and about 7.5, or between about 7.0 and about 7.8.

[0355] An immunogenic pharmaceutical composition can be sterile. The immunogenic pharmaceutical composition can be non-pyrogenic e.g. containing <1 EU (endotoxin unit, a standard measure) per dose, and can be <0.1 EU per dose. The composition can be gluten free.

[0356] An immunogenic pharmaceutical composition can include detergent e.g. a polyoxyethylene sorbitan ester surfactant (known as ‘Tweens’), or an octoxynol (such as octoxynol-9 (Triton X-100) or t-octylphenoxypolyethoxyethanol). The detergent can be present only at trace amounts. The immunogenic pharmaceutical composition can include less than 1 mg/mL of each of octoxynol-10 and polysorbate 80. Other residual components in trace amounts can be antibiotics (e.g. neomycin, kanamycin, polymyxin B).

[0357] An immunogenic pharmaceutical composition can be formulated as a sterile solution or suspension, in suitable vehicles, well known in the art. The pharmaceutical compositions can be sterilized by conventional, well-known sterilization techniques, or can be sterile filtered. The resulting aqueous solutions can be packaged for use as is, or lyophilized, the lyophilized preparation being combined with a sterile solution prior to administration.

[0358] An immunogenic pharmaceutical composition can be formulated with one or more pharmaceutically acceptable salts. Pharmaceutically acceptable salts can include those of the inorganic ions, such as, for example, sodium, potassium, calcium, magnesium ions, and the like. Such salts can include salts with inorganic or organic acids, such as hydrochloric acid, hydrobromic acid, phosphoric acid, nitric acid, sulfuric acid, methanesulfonic acid, p-toluenesulfonic acid, acetic acid, fumaric acid, succinic acid, lactic acid, mandelic acid, malic acid, citric acid, tartaric acid or maleic acid. In addition, if the agent(s) contain a carboxy group or other acidic group, it can be converted into a pharmaceutically acceptable addition salt with inorganic or organic bases. Examples of suitable bases include sodium hydroxide, potassium hydroxide, ammonia, cyclohexylamine, dicyclohexyl-amine, ethanolamine, diethanolamine, triethanolamine, and the like.

[0359] Pharmaceutical compositions comprising, for example, an active agent such as a peptide, a nucleic acid, an antibody or fragments thereof, and/or an APC described herein, in combination with one or more adjuvants can be formulated to comprise certain molar ratios. For example, molar ratios of about 99:1 to about 1:99 of an active agent such as a peptide, a nucleic acid, an antibody or fragments thereof, and/or an APC described herein, in combination with one or more adjuvants can be used. In some instances, the range of molar ratios of an active agent such as a peptide, a nucleic acid, an antibody or fragments thereof, and/or an APC described herein, in combination with one or more adjuvants can be selected from about 80:20 to about 20:80; about 75:25 to about 25:75, about 70:30 to about 30:70, about 66:33 to about 33:66, about 60:40 to about 40:60: about 50:50; and about 90:10 to about 10:90. The molar ratio of an active agent such as a peptide, a nucleic acid, an antibody or fragments thereof, and/or an APC described herein, in combination with one or more adjuvants can be about 1:9, and in some cases can be about 1:1. The active agent such as a peptide, a nucleic acid, an antibody or fragments thereof, and/or an APC described herein, in combination with one or more adjuvants can be formulated together, in the same dosage unit e.g., in one vial, suppository, tablet, capsule, an aerosol spray; or each agent, form, and/or compound can be formulated in separate units, e.g., two vials, suppositories, tablets, two capsules, a tablet and a vial, an aerosol spray, and the like.

[0360] In some instances, an immunogenic pharmaceutical composition can be administered with an additional agent. The choice of the additional agent can depend, at least in part, on the condition being treated. The additional agent can include, for example, any agents having a therapeutic effect for a pathogen infection (e.g. viral infection), including, e.g., drugs used to treat inflammatory conditions such as an NSAID, e.g., ibuprofen, naproxen, acetaminophen, ketoprofen, or aspirin. As another example, formulations can additionally contain one or more supplements, such as vitamin C, E or other anti-oxidants.

[0361] A pharmaceutical composition comprising an active agent such as a peptide, a nucleic acid, an antibody or fragments thereof, and/or an APC described herein, in combination with one or more adjuvants can be formulated in conventional manner using one or more physiologically acceptable carriers, comprising excipients, diluents, and/or auxiliaries, e.g., which facilitate processing of the active agents into preparations that can be administered. Proper formulation can depend at least in part upon the route of administration chosen. The agent(s) described herein can be delivered to a patient using a number of routes or modes of administration, including oral, buccal, topical, rectal, transdermal, transmucosal, subcutaneous, intravenous, and intramuscular applications, as well as by inhalation.

[0362] The active agents can be formulated for parenteral administration (e.g., by injection, for example bolus injection or continuous infusion) and can be presented in unit dose form in ampoules, pre-filled syringes, small volume infusion or in multi-dose containers with an added preservative. The compositions can take such forms as suspensions, solutions, or emulsions in oily or aqueous vehicles, for example solutions in aqueous polyethylene glycol.

[0363] For injectable formulations, the vehicle can be chosen from those known in art to be suitable, including aqueous solutions or oil suspensions, or emulsions, with sesame oil, corn oil, cottonseed oil, or peanut oil, as well as elixirs, mannitol, dextrose, or a sterile aqueous solution, and similar pharmaceutical vehicles. The formulation can also comprise polymer compositions which are biocompatible, biodegradable, such as poly(lactic-co-glycolic)acid. These materials can be made into micro or nanospheres, loaded with drug and further coated or derivatized to provide superior sustained release performance. Vehicles suitable for periocular or intraocular injection include, for example, suspensions of therapeutic agent in injection grade water, liposomes and vehicles suitable for lipophilic substances. Other vehicles for periocular or intraocular injection are well known in the art.

[0364] In some instances, pharmaceutical composition is formulated in accordance with routine procedures as a pharmaceutical composition adapted for intravenous administration to human beings. Typically, compositions for intravenous administration are solutions in sterile isotonic aqueous buffer. Where necessary, the composition can also include a solubilizing agent and a local anesthetic such as lidocaine to ease pain at the site of the injection. Generally, the ingredients are supplied either separately or mixed together in unit dosage form, for example, as a dry lyophilized powder or water free concentrate in a hermetically sealed container such as an ampoule or sachette indicating the quantity of active agent. Where the composition is to be administered by infusion, it can be dispensed with an infusion bottle containing sterile pharmaceutical grade water or saline. Where the composition is administered by injection, an ampoule of sterile water for injection or saline can be provided so that the ingredients can be mixed prior to administration.

[0365] When administration is by injection, the active agent can be formulated in aqueous solutions, specifically in physiologically compatible buffers such as Hanks solution, Ringer's solution, or physiological saline buffer. The solution can contain formulatory agents such as suspending, stabilizing and/or dispersing agents. Alternatively, the active compound can be in powder form for constitution with a suitable vehicle, e.g., sterile pyrogen-free water, before use. In another embodiment, the pharmaceutical composition does not comprise an adjuvant or any other substance added to enhance the immune response stimulated by the peptide. In another embodiment, the pharmaceutical composition comprises a substance that inhibits an immune response to the peptide.

[0366] In addition to the formulations described previously, the active agents can also be formulated as a depot preparation. Such long acting formulations can be administered by implantation or transcutaneous delivery (for example subcutaneously or intramuscularly), intramuscular injection or use of a transdermal patch. Thus, for example, the agents can be formulated with suitable polymeric or hydrophobic materials (for example as an emulsion in an acceptable oil) or ion exchange resins, or as sparingly soluble derivatives, for example, as a sparingly soluble salt.

[0367] In cases, pharmaceutical compositions comprising one or more agents exert local and regional effects when administered topically or injected at or near particular sites of infection. Direct topical application, e.g., of a viscous liquid, solution, suspension, dimethylsulfoxide (DMSO)-based solutions, liposomal formulations, gel, jelly, cream, lotion, ointment, suppository, foam, or aerosol spray, can be used for local administration, to produce for example local and/or regional effects. Pharmaceutically appropriate vehicles for such formulation include, for example, lower aliphatic alcohols, polyglycols (e.g., glycerol or polyethylene glycol), esters of fatty acids, oils, fats, silicones, and the like. Such preparations can also include preservatives (e.g., p-hydroxybenzoic acid esters) and/or antioxidants (e.g., ascorbic acid and tocopherol). See also Dermatological Formulations: Percutaneous absorption, Barry (Ed.), Marcel Dekker Incl. 1983. In another embodiment, local/topical formulations comprising a transporter, carrier, or ion channel inhibitor are used to treat epidermal or mucosal viral infections.

[0368] Pharmaceutical compositions can contain a cosmetically or dermatologically acceptable carrier. Such carriers are compatible with skin, nails, mucous membranes, tissues and/or hair, and can include any conventionally used cosmetic or dermatological carrier meeting these requirements. Such carriers can be readily selected by one of ordinary skill in the art. In formulating skin ointments, an agent or combination of agents can be formulated in an oleaginous hydrocarbon base, an anhydrous absorption base, a water-in-oil absorption base, an oil-in-water water-removable base and/or a water-soluble base. Examples of such carriers and excipients include, but are not limited to, humectants (e.g., urea), glycols (e.g., propylene glycol), alcohols (e.g., ethanol), fatty acids (e.g., oleic acid), surfactants (e.g., isopropyl myristate and sodium lauryl sulfate), pyrrolidones, glycerol monolaurate, sulfoxides, terpenes (e.g., menthol), amines, amides, alkanes, alkanols, water, calcium carbonate, calcium phosphate, various sugars, starches, cellulose derivatives, gelatin, and polymers such as polyethylene glycols.

[0369] Ointments and creams can, for example, be formulated with an aqueous or oily base with the addition of suitable thickening and/or gelling agents. Lotions can be formulated with an aqueous or oily base and will in general also containing one or more emulsifying agents, stabilizing agents, dispersing agents, suspending agents, thickening agents, or coloring agents. The construction and use of transdermal patches for the delivery of pharmaceutical agents is well known in the art. Such patches can be constructed for continuous, pulsatile, or on demand delivery of pharmaceutical agents.

[0370] Lubricants which can be used to form pharmaceutical compositions and dosage forms can include, but are not limited to, calcium stearate, magnesium stearate, mineral oil, light mineral oil, glycerin, sorbitol, mannitol, polyethylene glycol, other glycols, stearic acid, sodium lauryl sulfate, talc, hydrogenated vegetable oil (e.g., peanut oil, cottonseed oil, sunflower oil, sesame oil, olive oil, corn oil, and soybean oil), zinc stearate, ethyl oleate, ethyl laureate, agar, or mixtures thereof. Additional lubricants include, for example, a syloid silica gel, a coagulated aerosol of synthetic silica, or mixtures thereof. A lubricant can optionally be added, in an amount of less than about 1 weight percent of the pharmaceutical composition.

[0371] The pharmaceutical compositions can be in any form suitable for topical application, including aqueous, aqueous-alcoholic or oily solutions, lotion or serum dispersions, aqueous, anhydrous or oily gels, emulsions obtained by dispersion of a fatty phase in an aqueous phase (O/W or oil in water) or, conversely, (W/O or water in oil), microemulsions or alternatively microcapsules, microparticles or lipid vesicle dispersions of ionic and/or nonionic type. These compositions can be prepared according to conventional methods. The amounts of the various constituents of the compositions are those conventionally used in the art. These compositions in particular constitute protection, treatment or care creams, milks, lotions, gels or foams for the face, for the hands, for the body and/or for the mucous membranes, or for cleansing the skin. The compositions can also consist of solid preparations constituting soaps or cleansing bars.

[0372] Pharmaceutical compositions can contain adjuvants such as hydrophilic or lipophilic gelling agents, hydrophilic or lipophilic active agents, preserving agents, antioxidants, solvents, fragrances, fillers, sunscreens, odor-absorbers and dyestuffs. The amounts of these various adjuvants are those conventionally used in the fields considered and, for example, are from about 0.01% to about 20% of the total weight of the composition. Depending on their nature, these adjuvants can be introduced into the fatty phase, into the aqueous phase and/or into the lipid vesicles.

[0373] In instances relating to topical/local application, the pharmaceutical compositions can include one or more penetration enhancers. For example, the formulations can comprise suitable solid or gel phase carriers or excipients that increase penetration or help delivery of agents or combinations of agents of the invention across a permeability barrier, e.g., the skin. Many of these penetration-enhancing compounds are known in the art of topical formulation, and include, e.g., water, alcohols (e.g., terpenes like methanol, ethanol, 2-propanol), sulfoxides (e.g., dimethyl sulfoxide, decylmethyl sulfoxide, tetradecylmethyl sulfoxide), pyrrolidones (e.g., 2-pyrrolidone, N-methyl-2-pyrrolidone, N-(2-hydroxyethyl)pyrrolidone), laurocapram, acetone, dimethylacetamide, dimethylformamidc, tetrahydrofurfuryl alcohol, L-α-amino acids, anionic, cationic, amphoteric or nonionic surfactants (e.g., isopropyl myristate and sodium lauryl sulfate), fatty acids, fatty alcohols (e.g., oleic acid), amines, amides, clofibric acid amides, hexamcthylene lauramide, proteolytic enzymes, α-bisabolol, d-limonene, urea and N,N-diethyl-m-toluamide, and the like. Additional examples include humectants (e.g., urea), glycols (e.g., propylene glycol and polyethylene glycol), glycerol monolaurate, alkanes, alkanols, ORGELASE, calcium carbonate, calcium phosphate, various sugars, starches, cellulose derivatives, gelatin, and/or other polymers. In another embodiment, the pharmaceutical compositions will include one or more such penetration enhancers.

[0374] The pharmaceutical compositions for local/topical application can include one or more antimicrobial preservatives such as quaternary ammonium compounds, organic mercurials, p-hydroxy benzoates, aromatic alcohols, chlorobutanol, and the like.

[0375] The pharmaceutical compositions can be formulated into aerosol solutions, suspensions or dry powders. The aerosol can be administered through the respiratory system or nasal passages. For example, one skilled in the art will recognize that a composition of the present invention can be suspended or dissolved in an appropriate carrier, e.g., a pharmaceutically acceptable propellant, and administered directly into the lungs using a nasal spray or inhalant. For example, an aerosol formulation comprising a transporter, carrier, or ion channel inhibitor can be dissolved, suspended or emulsified in a propellant or a mixture of solvent and propellant, e.g., for administration as a nasal spray or inhalant. Aerosol formulations can contain any acceptable propellant under pressure, such as a cosmetically or dermatologically or pharmaceutically acceptable propellant, as conventionally used in the art.

[0376] An aerosol formulation for nasal administration is generally an aqueous solution designed to be administered to the nasal passages in drops or sprays. Nasal solutions can be similar to nasal secretions in that they are generally isotonic and slightly buffered to maintain a pH of about 5.5 to about 6.5, although pH values outside of this range can additionally be used. Antimicrobial agents or preservatives can also be included in the formulation.

[0377] An aerosol formulation for inhalations and inhalants can be designed so that the agent or combination of agents is carried into the respiratory tree of the subject when administered by the nasal or oral respiratory route. Inhalation solutions can be administered, for example, by a nebulizer. Inhalations or insufflations, comprising finely powdered or liquid drugs, can be delivered to the respiratory system as a pharmaceutical aerosol of a solution or suspension of the agent or combination of agents in a propellant, e.g., to aid in disbursement. Propellants can be liquefied gases, including halocarbons, for example, fluorocarbons such as fluorinated chlorinated hydrocarbons, hydrochlorofluorocarbons, and hydrochlorocarbons, as well as hydrocarbons and hydrocarbon ethers.

[0378] Halocarbon propellants can include fluorocarbon propellants in which all hydrogens are replaced with fluorine, chlorofluorocarbon propellants in which all hydrogens are replaced with chlorine and at least one fluorine, hydrogen-containing fluorocarbon propellants, and hydrogen-containing chlorofluorocarbon propellants. Hydrocarbon propellants useful in the invention include, for example, propane, isobutane, n-butane, pentane, isopentane and neopentane. A blend of hydrocarbons can also be used as a propellant.

[0379] Ether propellants include, for example, dimethyl ether as well as the ethers. An aerosol formulation of the invention can also comprise more than one propellant. For example, the aerosol formulation can comprise more than one propellant from the same class, such as two or more fluorocarbons; or more than one, more than two, more than three propellants from different classes, such as a fluorohydrocarbon and a hydrocarbon. Pharmaceutical compositions of the present invention can also be dispensed with a compressed gas, e.g., an inert gas such as carbon dioxide, nitrous oxide or nitrogen.

[0380] Aerosol formulations can also include other components, for example, ethanol, isopropanol, propylene glycol, as well as surfactants or other components such as oils and detergents. These components can serve to stabilize the formulation and/or lubricate valve components.

[0381] The aerosol formulation can be packaged under pressure and can be formulated as an aerosol using solutions, suspensions, emulsions, powders and semisolid preparations. For example, a solution aerosol formulation can comprise a solution of an agent of the invention such as a transporter, carrier, or ion channel inhibitor in (substantially) pure propellant or as a mixture of propellant and solvent. The solvent can be used to dissolve the agent and/or retard the evaporation of the propellant. Solvents can include, for example, water, ethanol and glycols. Any combination of suitable solvents can be use, optionally combined with preservatives, antioxidants, and/or other aerosol components.

[0382] An aerosol formulation can be a dispersion or suspension. A suspension aerosol formulation can comprise a suspension of an agent or combination of agents of the instant invention, e.g., a transporter, carrier, or ion channel inhibitor, and a dispersing agent. Dispersing agents can include, for example, sorbitan trioleate, oleyl alcohol, oleic acid, lecithin and corn oil. A suspension aerosol formulation can also include lubricants, preservatives, antioxidant, and/or other aerosol components.

[0383] An aerosol formulation can similarly be formulated as an emulsion. An emulsion aerosol formulation can include, for example, an alcohol such as ethanol, a surfactant, water and a propellant, as well as an agent or combination of agents of the invention, e.g., a transporter, carrier, or ion channel. The surfactant used can be nonionic, anionic or cationic. One example of an emulsion aerosol formulation comprises, for example, ethanol, surfactant, water and propellant. Another example of an emulsion aerosol formulation comprises, for example, vegetable oil, glyceryl monostearate and propane.

[0384] The pharmaceutical compounds can be formulated for administration as suppositories. A low melting wax, such as a mixture of triglycerides, fatty acid glycerides, Witepsol S55 (trademark of Dynamite Nobel Chemical, Germany), or cocoa butter is first melted and the active component is dispersed homogeneously, for example, by stirring. The molten homogeneous mixture is then poured into convenient sized molds, allowed to cool, and to solidify.

[0385] The pharmaceutical compositions can be formulated for vaginal administration. Pessaries, tampons, creams, gels, pastes, foams or sprays containing in addition to the active ingredient such carriers as are known in the art to be appropriate.

[0386] The pharmaceutical compositions can be attached releasably to biocompatible polymers for use in sustained release formulations on, in or attached to inserts for topical, intraocular, periocular, or systemic administration. The controlled release from a biocompatible polymer can be utilized with a water soluble polymer to form a instillable formulation, as well. The controlled release from a biocompatible polymer, such as for example, PLGA microspheres or nanospheres, can be utilized in a formulation suitable for intra ocular implantation or injection for sustained release administration, as well. Any suitable biodegradable and biocompatible polymer can be used.

### Production of Tissue-Specific Antigens

[0387] The present disclosure is based, at least in part, on the ability to present the immune system of the patient with one or more tissue-specific antigens. One of skill in the art from this disclosure and the knowledge in the art will appreciate that there are a variety of ways in which to produce such tissue-specific antigens. In general, such tissue-specific antigens can be produced either in vitro or in vivo. Tissue-specific antigens can be produced in vitro as peptides or polypeptides, which can then be formulated into a vaccine or pharmaceutical composition and administered to a subject. As described in further detail herein, such in vitro production can occur by a variety of methods known to one of skill in the art such as, for example, peptide synthesis or expression of a peptide/polypeptide from a DNA or RNA molecule in any of a variety of bacterial, eukaryotic, or viral recombinant expression systems, followed by purification of the expressed peptide/polypeptide. Alternatively, tissue-specific antigens can be produced in vivo by introducing molecules (e.g., DNA, RNA, viral expression systems, and the like) that encode tissue-specific antigens into a subject, whereupon the encoded tissue-specific antigens are expressed. The methods of in vitro and in vivo production of antigens are also further described herein as they relate to pharmaceutical compositions and methods of delivery of the therapy.

[0388] In Vitro Peptide Polypeptide Synthesis

[0389] Proteins or peptides of the present disclosure, e.g., tissue-specific antigenic peptides, e.g., tissue-specific antigens comprising tumor epitope sequence as provided herein, can be made by any technique known to those of skill in the art, including the expression of proteins, polypeptides or peptides through standard molecular biological techniques, the isolation of proteins or peptides from natural sources, in vitro translation, or the chemical synthesis of proteins or peptides.

[0390] Peptides of the present disclosure can be readily synthesized chemically utilizing reagents that are free of contaminating bacterial or animal substances (Merrifield RB: Solid phase peptide synthesis. I. The synthesis of a tetrapeptide. J. Am. Chem. Soc. 85:2149-54, 1%3). In some embodiments, antigenic peptides of the present disclosure are prepared by (1) parallel solid-phase synthesis on multi-channel instruments using uniform synthesis and cleavage conditions; (2) purification over a RP-HPLC column with column stripping; and re-washing, but not replacement, between peptides; followed by (3) analysis with a limited set of the most informative assays. The Good Manufacturing Practices (GMP) footprint can be defined around the set of peptides for an individual patient, thus requiring suite changeover procedures only between syntheses of peptides for different patients.

[0391] Alternatively, a nucleic acid (e.g., a polynucleotide) encoding an antigenic peptide of the present disclosure can be used to produce the antigenic peptide in vitro. The polynucleotide can be, e.g., DNA, cDNA, PNA, CNA, RNA, either single- and/or double-stranded, or native or stabilized forms of polynucleotides, such as e.g. polynucleotides with a phosphorothiate backbone, or combinations thereof and it can contain introns so long as it codes for the peptide. In one embodiment in vitro translation is used to produce the peptide. Many exemplary systems exist that one skilled in the art could utilize (e.g., Retic Lysate IVT Kit, Life Technologies, Waltham, MA). An expression vector capable of expressing a polypeptide can also be prepared. Expression vectors for different cell types are well known in the art and can be selected without undue experimentation. Generally, the DNA is inserted into an expression vector, such as a plasmid, in proper orientation and correct reading frame for expression. If necessary, the DNA can be linked to the appropriate transcriptional and translational regulatory control nucleotide sequences recognized by the desired host (e.g., bacteria), although such controls are generally available in the expression vector. The vector is then introduced into the host bacteria for cloning using standard techniques (see, e.g., Sambrook et al. (1989) Molecular Cloning, A Laboratory Manual, Cold Spring Harbor Laboratory, Cold Spring Harbor, N.Y.).

[0392] Expression vectors comprising the isolated polynucleotides, as well as host cells containing the expression vectors, are also contemplated. The antigenic peptides can be provided in the form of RNA or cDNA molecules encoding the desired antigenic peptides. One or more antigenic peptides of the disclosure can be encoded by a single expression vector.

[0393] In some embodiments, the polynucleotides can comprise the coding sequence for the tissue-specific antigenic peptide fused in the same reading frame to a polynucleotide which aids, for example, in expression and/or secretion of a polypeptide from a host cell (e.g., a leader sequence which functions as a secretory sequence for controlling transport of a polypeptide from the cell). The polypeptide having a leader sequence is a preprotein and can have the leader sequence cleaved by the host cell to form the mature form of the polypeptide.

[0394] In some embodiments, the polynucleotides can comprise the coding sequence for the antigenic peptide of the present disclosure fused in the same reading frame to a marker sequence that allows, for example, for purification of the encoded polypeptide, which can then be incorporated into a personalized vaccine or immunogenic composition. For example, the marker sequence can be a hexa-histidine tag (SEQ ID NO: 8965) supplied by a pQE-9 vector to provide for purification of the mature polypeptide fused to the marker in the case of a bacterial host, or the marker sequence can be a hemagglutinin (HA) tag derived from the influenza hemagglutinin protein when a mammalian host (e.g., COS-7 cells) is used. Additional tags include, but are not limited to, Calmodulin tags, FLAG tags, Myc tags, S tags, SBP tags, Softag 1, Softag 3, V5 tag, Xpress tag, Isopeptag, SpyTag, Biotin Carboxyl Carrier Protein (BCCP) tags, GST tags, fluorescent protein tags (e.g., green fluorescent protein tags), maltose binding protein tags, Nus tags, Strep-tag, thioredoxin tag, TC tag, Ty tag, and the like.

[0395] In some embodiments, the polynucleotides can comprise the coding sequence for one or more of the tissue-specific antigenic peptides fused in the same reading frame to create a single concatamerized antigenic peptide construct capable of producing multiple antigenic peptides.

[0396] In some embodiments, isolated nucleic acid molecules having a nucleotide sequence at least 60% identical, at least 65% identical, at least 70% identical, at least 75% identical, at least 80% identical, at least 85% identical, at least 90% identical, at least 95% identical, or at least 96%, 97%, 98% or 99% identical to a polynucleotide encoding a tissue-specific antigenic peptide of the present disclosure, can be provided.

[0397] Isolated tissue-specific antigenic peptides described herein can be produced in vitro (e.g., in the laboratory) by any suitable method known in the art. Such methods range from direct protein synthetic methods to constructing a DNA sequence encoding isolated polypeptide sequences and expressing those sequences in a suitable transformed host. In some embodiments, a DNA sequence is constructed using recombinant technology by isolating or synthesizing a DNA sequence encoding a wild-type protein of interest. Optionally, the sequence can be mutagenized by site-specific mutagenesis to provide functional analogs thereof. See, e.g. Zoeller et al., Proc. Nat'l. Acad. Sci. USA 81:5662-5066 (1984) and U.S. Pat. No. 4,588,585.

[0398] In some embodiments, a DNA sequence encoding a polypeptide as provided herein would be constructed by chemical synthesis using an oligonucleotide synthesizer. Such oligonucleotides can be designed based on the amino acid sequence of the desired polypeptide and selecting those codons that are favored in the host cell in which the recombinant polypeptide of interest is produced. Standard methods can be applied to synthesize an isolated polynucleotide sequence encoding an isolated polypeptide of interest. For example, a complete amino acid sequence can be used to construct a back-translated gene. Further, a DNA oligomer containing a nucleotide sequence coding for the particular isolated polypeptide can be synthesized. For example, several small oligonucleotides coding for portions of the desired polypeptide can be synthesized and then ligated. The individual oligonucleotides typically contain 5′ or 3′ overhangs for complementary assembly

[0399] Once assembled (e.g., by synthesis, site-directed mutagenesis, or another method), the polynucleotide sequences encoding a particular isolated polypeptide can be inserted into an expression vector and optionally operatively linked to an expression control sequence appropriate for expression of the protein in a desired host. Proper assembly can be confirmed by nucleotide sequencing, restriction mapping, and expression of a biologically active polypeptide in a suitable host. As well known in the art, in order to obtain high expression levels of a transfected gene in a host, the gene can be operatively linked to transcriptional and translational expression control sequences that are functional in the chosen expression host.

[0400] Recombinant expression vectors can be used to amplify and express DNA encoding the tissue-specific antigenic peptides described herein. Recombinant expression vectors are replicable DNA constructs which have synthetic or cDNA-derived DNA fragments encoding a tissue-specific antigenic peptide or a bioequivalent analog operatively linked to suitable transcriptional or translational regulatory elements derived from mammalian, microbial, viral or insect genes. A transcriptional unit generally comprises an assembly of (1) a genetic element or elements having a regulatory role in gene expression, for example, transcriptional promoters or enhancers, (2) a structural or coding sequence which is transcribed into mRNA and translated into protein, and (3) appropriate transcription and translation initiation and termination sequences, as described in detail herein. Such regulatory elements can include an operator sequence to control transcription. The ability to replicate in a host, usually conferred by an origin of replication, and a selection gene to facilitate recognition of transformants can additionally be incorporated. DNA regions are operatively linked when they are functionally related to each other. For example, DNA for a signal peptide (secretory leader) is operatively linked to DNA for a polypeptide if it is expressed as a precursor which participates in the secretion of the polypeptide; a promoter is operatively linked to a coding sequence if it controls the transcription of the sequence: or a ribosome binding site is operatively linked to a coding sequence if it is positioned so as to permit translation. Generally, operatively linked means contiguous, and in the case of secretory leaders, means contiguous and in reading frame. Structural elements intended for use in yeast expression systems include a leader sequence enabling extracellular secretion of translated protein by a host cell. Alternatively, where recombinant protein is expressed without a leader or transport sequence, it can include an N-terminal methionine residue. This residue can optionally be subsequently cleaved from the expressed recombinant protein to provide a final product.

[0401] Useful expression vectors for producing polypeptides of the present disclosure in eukaryotic hosts, especially mammals or humans include, for example, vectors comprising expression control sequences from SV40, bovine papilloma virus, adenovirus and cytomegalovirus. Useful expression vectors for bacterial hosts include known bacterial plasmids, such as plasmids from Escherichia coli, including pCR 1, pBR322, pMB9 and their derivatives, wider host range plasmids, such as M13 and filamentous single-stranded DNA phages.

[0402] Suitable host cells for expression of a polypeptide of the present disclosure can include prokaryotes, yeast, insect or higher eukaryotic cells under the control of appropriate promoters. Prokaryotes include gram negative or gram positive organisms, for example E. coli or bacilli. Higher eukaryotic cells include established cell lines of mammalian origin. Cell-free translation systems could also be employed. Appropriate cloning and expression vectors for use with bacterial, fungal, yeast, and mammalian cellular hosts are well known in the art (see Pouwels et al., Cloning Vectors: A Laboratory Manual, Elsevier, N.Y., 1985).

[0403] Various mammalian or insect cell culture systems can also be employed to express recombinant protein as provided herein. Expression of recombinant proteins in mammalian cells can be performed because such proteins are generally correctly folded, appropriately modified and completely functional. Examples of suitable mammalian host cell lines include the COS-7 lines of monkey kidney cells, described by Gluzman (Cell 23:175, 1981), and other cell lines capable of expressing an appropriate vector including, for example, L cells, C127, 3T3, Chinese hamster ovary (CHO), 293, HeLa and BHK cell lines. Mammalian expression vectors can comprise nontranscribed elements such as an origin of replication, a suitable promoter and enhancer linked to the gene to be expressed, and other 5′ or 3′ flanking nontranscribed sequences, and 5′ or 3′ nontranslated sequences, such as necessary ribosome binding sites, a polyadenylation site, splice donor and acceptor sites, and transcriptional termination sequences. Baculovirus systems for production of heterologous proteins in insect cells are reviewed by Luckow and Summers, Bio/Technology 6:47 (1988).

[0404] The proteins as provided herein produced by a transformed host can be purified according to any suitable method. Such standard methods include chromatography (e.g., ion exchange, affinity and sizing column chromatography, and the like), centrifugation, differential solubility, or by any other standard technique for protein purification. Affinity tags such as hexahistidine (SEQ ID NO: 8965), maltose binding domain, influenza coat sequence, glutathione-S-transferase, and the like can be attached to the protein to allow easy purification by passage over an appropriate affinity column. Isolated proteins can also be physically characterized using such techniques as proteolysis, nuclear magnetic resonance and x-ray crystallography. For example, supernatants from systems which secrete recombinant protein into culture media can be first concentrated using a commercially available protein concentration filter, for example, an Amicon or Millipore Pellicon ultrafiltration unit. Following the concentration step, the concentrate can be applied to a suitable purification matrix. Alternatively, an anion exchange resin can be employed, for example, a matrix or substrate having pendant diethylaminoethyl (DEAE) groups. The matrices can be acrylamide, agarose, dextran, cellulose or other types commonly employed in protein purification. Alternatively, a cation exchange step can be employed. Suitable cation exchangers include various insoluble matrices comprising sulfopropyl or carboxymethyl groups. Finally, one or more reversed-phase high performance liquid chromatography (RP-HPLC) steps employing hydrophobic RP-HPLC media, e.g., silica gel having pendant methyl or other aliphatic groups, can be employed to further purify a cancer stem cell protein-Fc composition. Some or all of the foregoing purification steps, in various combinations, can also be employed to provide a homogeneous recombinant protein.

[0405] Recombinant protein as described herein produced in bacterial culture can be isolated, for example, by initial extraction from cell pellets, followed by one or more concentration, salting-out, aqueous ion exchange or size exclusion chromatography steps. High performance liquid chromatography (HPLC) can be employed for final purification steps. Microbial cells employed in expression of a recombinant protein can be disrupted by any convenient method, including freeze-thaw cycling, sonication, mechanical disruption, or use of cell lysing agents.

[0406] In Vivo Peptide/Polypeptide Synthesis

[0407] The present disclosure also contemplates the use of nucleic acid molecules as vehicles for delivering antigenic peptides/polypeptides to the subject in need thereof, in vivo, in the form of, e.g., DNA/RNA vaccines (see, e.g., WO2012/159643, and WO2012/159754, hereby incorporated by reference in their entireties).

[0408] In some embodiments, antigens can be administered to a patient in need thereof by use of a plasmid. These are plasmids which usually consist of a strong viral promoter to drive the in vivo transcription and translation of the gene (or complementary DNA) of interest (Mor, et al., (1995). The Journal of Immunology 155 (4): 2039-2046). Intron A can sometimes be included to improve mRNA stability and hence increase protein expression (Leitner, et al. (1997).The Journal of Immunology 159 (12): 6112-6119). Plasmids also include a strong polyadenylation/transcriptional termination signal, such as bovine growth hormone or rabbit beta-globulin polyadenylation sequences (Alarcon et al., (1999). Adv. Parasitol. Advances in Parasitology 42: 343-410; Robinson et al., (2000). Adv. Virus Res. Advances in Virus Research 55: 1-74; Böhmet al., (1996). Journal of Immunological Methods 193 (1): 29-40.). Multicistronic vectors are sometimes constructed to express more than one immunogen, or to express an immunogen and an immunostimulatory protein (Lewis et al., (1999). Advances in Virus Research (Academic Press) 54: 129-88).

[0409] In some embodiments, plasmids can be introduced into animal tissues by a number of different methods. Among others, two approaches can be injection of DNA in saline, using a standard hypodermic needle, and gene gun delivery. Injection in saline can be normally conducted intramuscularly (IM) in skeletal muscle, or intradermally (ID), with DNA being delivered to the extracellular spaces. This can be assisted by electroporation by temporarily damaging muscle fibers with myotoxins such as bupivacaine; or by using hypertonic solutions of saline or sucrose (Alarcon et al., (1999). Adv. Parasitol. Advances in Parasitology 42: 343-410). Immune responses to this method of delivery can be affected by many factors, including needle type, needle alignment, speed of injection, volume of injection, muscle type, and age, sex and physiological condition of the animal being injected(Alarcon et al., (1999). Adv. Parasitol. Advances in Parasitology 42: 343-410).

[0410] Gene gun delivery, also useful for the present disclosure, can ballistically accelerate plasmid DNA (pDNA) that has been adsorbed onto gold or tungsten microparticles into the target cells, using compressed helium as an accelerant (Alarcon et al., (1999). Adv. Parasitol. Advances in Parasitology 42: 343-410: Lewis et al., (1999). Advances in Virus Research (Academic Press) 54: 129-88).

[0411] Alternative delivery methods can include aerosol instillation of naked DNA on mucosal surfaces, such as the nasal and lung mucosa, (Lewis et al., (1999). Advances in Virus Research (Academic Press) 54: 129-88) and topical administration of pDNA to the eye and vaginal mucosa (Lewis et al., (1999) Advances in Virus Research (Academic Press) 54: 129-88). Mucosal surface delivery can be achieved using cationic liposome-DNA preparations, biodegradable microspheres, attenuated Shigella or Listeria vectors for oral administration to the intestinal mucosa, and recombinant adenovirus vectors. DNA or RNA can also be delivered to cells following mild mechanical disruption of the cell membrane, temporarily permeabilizing the cells. Such a mild mechanical disruption of the membrane can be accomplished by gently forcing cells through a small aperture (Ex vivo Cytosolic Delivery of Functional Macromolecules to Immune Cells, Sharei et al, PLOS ONE|DOI:10.1371/journal.pone.0118803 Apr. 13, 2015).

[0412] In some embodiments, a vaccine or pharmaceutical composition comprising tissue specific antigen can include separate DNA plasmids encoding, for example, one or more antigenic peptides/polypeptides as identified according to the disclosure. As discussed herein, the exact choice of expression vectors can depend upon the peptide/polypeptides to be expressed, and is well within the skill of the ordinary artisan. The expected persistence of the DNA constructs (e.g., in an episomal, non-replicating, non-integrated form in the muscle cells) is expected to provide an increased duration of protection.

[0413] One or more antigenic peptides of the present disclosure can be encoded and expressed in vivo using a viral based system (e.g., an adenovirus system, an adeno associated virus (AAV) vector, a poxvirus, or a lentivirus). In one embodiment, the vaccine or pharmaceutical composition can include a viral based vector for use in a human patient in need thereof, such as, for example, an adenovirus (see, e.g., Baden et al. First-in-human evaluation of the safety and immunogenicity of a recombinant adenovirus serotype 26 HIV-1 Env vaccine (IPCAVD 001). J Infect Dis. 2013 Jan. 15; 207(2):240-7, hereby incorporated by reference in its entirety). Plasmids that can be used for adeno associated virus, adenovirus, and lentivirus delivery have been described previously (see e.g., U.S. Pat. Nos. 6,955,808 and 6,943,019, and U.S. Patent application No. 20080254008, hereby incorporated by reference).

[0414] The peptides and polypeptides of the disclosure can also be expressed by a vector, e.g., a nucleic acid molecule as herein-discussed, e.g., RNA or a DNA plasmid, a viral vector such as a poxvirus, e.g., orthopox virus, avipox virus, or adenovirus, AAV or lentivirus. This approach involves the use of a vector to express nucleotide sequences that encode the peptide of the disclosure. Upon introduction into an acutely or chronically infected host or into a noninfected host, the vector can express the immunogenic peptide, and thereby can elicit a host CTL response.

[0415] Among vectors that can be used in the practice of the disclosure, integration in the host genome of a cell is possible with retrovirus gene transfer methods, often resulting in long term expression of the inserted transgene. In some embodiments, the retrovirus is a lentivirus. Additionally, high transduction efficiencies have been observed in many different cell types and target tissues. The tropism of a retrovirus can be altered by incorporating foreign envelope proteins, expanding the potential target population of target cells. A retrovirus can also be engineered to allow for conditional expression of the inserted transgene, such that only certain cell types are infected by the lentivirus. Cell type specific promoters can be used to target expression in specific cell types. Lentiviral vectors are retroviral vectors (and hence both lentiviral and retroviral vectors can be used in the practice of the disclosure). Moreover, lentiviral vectors are able to transduce or infect non-dividing cells and typically produce high viral titers. Selection of a retroviral gene transfer system can therefore depend on the target tissue. Retroviral vectors are comprised of cis-acting long terminal repeats with packaging capacity for up to 6-10 kb of foreign sequence. The minimum cis-acting LTRs are sufficient for replication and packaging of the vectors, which are then used to integrate the desired nucleic acid into the target cell to provide permanent expression. Widely used retroviral vectors that can be used in the practice of the disclosure include those based upon murine leukemia virus (MuLV), gibbon ape leukemia virus (GaLV), Simian Immunodeficiency virus (SIV), human immunodeficiency virus (HIV), and combinations thereof (see, e.g., Buchscher et al., (1992) J. Virol. 66:2731-2739; Johann et al., (1992) J. Virol. 66:1635-1640; Sommnerfelt et al., (1990) Virol. 176:58-59; Wilson et al., (1998) J. Virol. 63:2374-2378; Miller et al., (1991) J. Virol. 65:2220-2224; PCT/US94/05700).

[0416] Also useful in the practice of the disclosure is a minimal non-primate lentiviral vector, such as a lentiviral vector based on the equine infectious anemia virus (EIAV) (see, e.g., Balagaan, (2006) J Gene Med; 8: 275-285, Published online 21 Nov. 2005 in Wiley InterScience (interscience.wiley.com). DOI: 10.1002/jgm.845). The vectors can have cytomegalovirus (CMV) promoter driving expression of the target gene. Accordingly, the disclosure contemplates amongst vector(s) useful in the practice of the disclosure: viral vectors, including retroviral vectors and lentiviral vectors.

[0417] Lentiviral vectors have been disclosed as in the treatment for Parkinson's Disease, see, e.g., US Patent Publication No. 20120295960 and U.S. Pat. Nos. 7,303,910 and 7,351,585. Lentiviral vectors have also been disclosed for delivery to the Brain, see, e.g.. US Patent Publication Nos. US20110293571; US20040013648, US20070025970, US20090111106 and U.S. Pat. No. 7,259,015. In another embodiment lentiviral vectors are used to deliver vectors to the brain of those being treated for a disease, e.g., glioma. As to lentivirus vector systems useful in the practice of the disclosure, mention is made of U.S. Pat. Nos. 6,428,953, 6,165,782, 6,013,516, 5,994,136, 6,312,682, and 7,198,784, and documents cited therein. In an embodiment herein the delivery is via an lentivirus. Zou et al, administered about 10 μL of a recombinant lentivirus having a titer of 1×10⁹ transducing units (TU)/mL by an intrathecal catheter. These sort of dosages can be adapted or extrapolated to use of a retroviral or lentiviral vector in the present disclosure. For transduction in tissues such as the brain, it is necessary to use very small volumes, so the viral preparation is concentrated by ultracentrifugation. Other methods of concentration such as ultrafiltration or binding to and elution from a matrix can be used. In other embodiments the amount of lentivirus administered can be 1×10⁵ or about 1×10⁵ plaque forming units (PFU), 5×10⁵ or about 5×10⁵ PFU, 1×10⁶ or about 1×10⁶ PFU, 5×10⁶ or about 5×10⁶ PFU, 1×10⁷ or about 1×10⁷ PFU, 5×10⁷ or about 5×10⁷ PFU, 1×10⁸ or about 1×10⁸ PFU, 5×10⁸ or about 5×10⁸ PFU, 1×10⁹ or about 1×10⁹ PFU, 5×10⁹ or about 5×10⁹PFU, 1×10¹⁰ or about 1×10¹⁰ PFU or 5×10¹⁰ or about 5×10¹⁰ PFU as total single dosage for an average human of 75 kg or adjusted for the weight and size and species of the subject. One of skill in the art can determine suitable dosage. Suitable dosages for a virus can be determined empirically.

[0418] Also useful in the practice of the disclosure is an adenovirus vector. One advantage is the ability of recombinant adenoviruses to efficiently transfer and express recombinant genes in a variety of mammalian cells and tissues in vitro and in vivo, resulting in the high expression of the transferred nucleic acids. Further, the ability to productively infect quiescent cells, expands the utility of recombinant adenoviral vectors. In addition, high expression levels ensure that the products of the nucleic acids will be expressed to sufficient levels to generate an immune response (see e.g., U.S. Pat. No. 7,029,848, hereby incorporated by reference). As to adenovirus vectors useful in the practice of the disclosure, mention is made of U.S. Pat. No. 6,955,808. The adenovirus vector used can be selected from the group consisting of the Ad5, Ad35, Ad11, C6, and C7 vectors. The sequence of the Adenovirus 5 (“Ad5”) genome has been published. (Chroboczek, J., Bieber, F., and Jacrot, B. (1992) The Sequence of the Genome of Adenovirus Type 5 and Its Comparison with the Genome of Adenovirus Type 2, Virology 186, 280-285; the contents if which is hereby incorporated by reference). Ad35 vectors are described in U.S. Pat. Nos. 6,974,695, 6,913,922, and 6,869,794. Ad11 vectors are described in U.S. Pat. No. 6,913,922. C6 adenovirus vectors are described in U.S. Pat. Nos. 6,780,407; 6,537,594; 6,309,647; 6,265,189; 6,156,567; 6,090,393; 5,942,235 and 5,833,975. C7 vectors are described in U.S. Pat. No. 6,277,558. Adenovirus vectors that are E1-defective or deleted, E3-defective or deleted, and/or E4-defective or deleted can also be used. Certain adenoviruses having mutations in the E1 region have improved safety margin because E1-defective adenovirus mutants are replication-defective in non-permissive cells, or, at the very least, are highly attenuated. Adenoviruses having mutations in the E3 region can have enhanced the immunogenicity by disrupting the mechanism whereby adenovirus down-regulates MHC class I molecules. Adenoviruses having E4 mutations can have reduced immunogenicity of the adenovirus vector because of suppression of late gene expression. Such vectors can be particularly useful when repeated re-vaccination utilizing the same vector is desired. Adenovirus vectors that are deleted or mutated in El, E3, E4, E1 and E3, and E1 and E4 can be used in accordance with the present disclosure. Furthermore, “gutless” adenovirus vectors, in which all viral genes are deleted, can also be used in accordance with the present disclosure. Such vectors require a helper virus for their replication and require a special human 293 cell line expressing both E1a and Cre, a condition that does not exist in natural environment. Such “gutless” vectors are non-immunogenic and thus the vectors can be inoculated multiple times for re-vaccination. The “gutless” adenovirus vectors can be used for insertion of heterologous inserts/genes such as the transgenes of the present disclosure, and can even be used for co-delivery of a large number of heterologous inserts/genes. In some embodiments, the delivery is via an adenovirus, which can be at a single booster dose. In some embodiments, the adenovirus is delivered via multiple doses. In terms of in vivo delivery, AAV is advantageous over other viral vectors due to low toxicity and low probability of causing insertional mutagenesis because it doesn't integrate into the host genome. AAV has a packaging limit of 4.5 or 4.75 Kb. Constructs larger than 4.5 or 4.75 Kb result in significantly reduced virus production. There are many promoters that can be used to drive nucleic acid molecule expression. AAV ITR can serve as a promoter and is advantageous for eliminating the need for an additional promoter element. For ubiquitous expression, the following promoters can be used: CMV, CAG, CBh, PGK, SV40, Ferritin heavy or light chains, etc. For brain expression, the following promoters can be used: SynapsinI for all neurons, CaMKIIalpha for excitatory neurons, GAD67 or GAD65 or VGAT for GABAergic neurons, etc. Promoters used to drive RNA synthesis can include: Pol III promoters such as U6 or H1. The use of a Pol II promoter and intronic cassettes can be used to express guide RNA (gRNA). With regard to AAV vectors useful in the practice of the disclosure, mention is made of U.S. Pat. Nos. 5,658,785, 7,115,391, 7,172,893, 6,953,690, 6,936,466, 6,924,128, 6,893,865, 6,793,926, 6,537,540, 6,475,769 and 6,258,595, and documents cited therein. As to AAV. the AAV can be AAV1, AAV2, AAV5 or any combination thereof. One can select the AAV with regard to the cells to be targeted; e.g., one can select AAV serotypes 1, 2, 5 or a hybrid capsid AAV1, AAV2, AAV5 or any combination thereof for targeting brain or neuronal cells; and one can select AAV4 for targeting cardiac tissue. AAV8 is useful for delivery to the liver. In some embodiments the delivery is via an AAV. The dosage can be adjusted to balance the therapeutic benefit against any side effects.

[0419] In some embodiments, effectively activating a cellular immune response for a vaccine or pharmaceutical composition can be achieved by expressing the relevant antigens in a vaccine or pharmaceutical composition in a non-pathogenic microorganism. Well-known examples of such microorganisms are Mycobacterium bovis BCG. Salmonella and Pseudomonas (See, U.S. Pat. No. 6,991,797, hereby incorporated by reference in its entirety).

[0420] In some embodiments, a Poxvirus is used in the vaccine or immunogenic composition. These include orthopoxvirus, avipox, vaccinia, MVA, NYVAC, canarypox, ALVAC, fowlpox, TROVAC, etc. (see e.g., Verardi et al., Hum Vaccin Immunother. 2012 July; 8(7):961-70; and Moss, Vaccine. 2013: 31(39): 4220-4222). Poxvirus expression vectors were described in 1982 and quickly became widely used for vaccine development as well as research in numerous fields. Advantages of the vectors include simple construction, ability to accommodate large amounts of foreign DNA and high expression levels. Information concerning poxviruses that can be used in the practice of the disclosure, such as Chordopoxvirinae subfamily poxviruses (poxviruses of vertebrates), for instance, orthopoxviruses and avipoxviruses, e.g., vaccinia virus (e.g., Wyeth Strain, WR Strain (e.g., ATCC® VR-1354), Copenhagen Strain, NYVAC, NYVAC.1, NYVAC.2, MVA, MVA-BN), canarypox virus (e.g., Wheatley C93 Strain, ALVAC), fowlpox virus (e.g., FP9 Strain, Webster Strain, TROVAC), dovepox, pigeonpox, quailpox, and raccoon pox, inter alia, synthetic or non-naturally occurring recombinants thereof, uses thereof, and methods for making and using such recombinants can be found in scientific and patent literature.

[0421] In some embodiments, the vaccinia virus is used in the vaccine or pharmaceutical composition to express a tissue-specific antigen. (Rolph et al., Recombinant viruses as vaccines and immunological tools. Curr Opin Immunol 9:517-524, 1997). The recombinant vaccinia virus is able to replicate within the cytoplasm of the infected host cell and the polypeptide of interest can therefore induce an immune response. Moreover, Poxviruses have been widely used as vaccine or pharmaceutical composition vectors because of their ability to target encoded antigens for processing by the major histocompatibility complex class I pathway by directly infecting immune cells, in particular antigen-presenting cells, but also due to their ability to self-adjuvant.

[0422] In some embodiments, ALVAC is used as a vector in a vaccine or immunogenic composition. ALVAC is a canarypox virus that can be modified to express foreign transgenes and has been used as a method for vaccination against both prokaryotic and eukaryotic antigens (Hong H, Lee D S, Conkright W, et al. Phase I clinical trial of a recombinant canarypoxvirus (ALVAC) vaccine expressing human carcinoembryonic antigen and the B7.1 co-stimulatory molecule. Cancer Immunol Immunother 2000:49:504-14; von Mehren M, Arlen P, Tsang K Y, et al. Pilot study of a dual gene recombinant avipox vaccine containing both carcinoembryonic antigen (CEA) and B7.1 transgenes in patients with recurrent CEA-expressing adenocarcinomas. Clin Cancer Res 2000:6:2219-28: Musey L, Ding Y, Elizaga M, et al. HIV-1 vaccination administered intramuscularly can induce both systemic and mucosal T cell immunity in HIV-1-uninfected individuals. J Immunol 2003:171:1094-101: Paoletti E. Applications of pox virus vectors to vaccination: an update. Proc Nat Acad Sci USA 1996; 93:11349-53; U.S. Pat. No. 7,255,862). In a phase I clinical trial, an ALVAC virus expressing the tissue-specific antigen CEA showed an excellent safety profile and resulted in increased CEA-specific T-cell responses in selected patients, objective clinical responses, however, were not observed (Marshall J L, Hawkins M J, Tsang K Y, et al. Phase I study in cancer patients of a replication-defective avipox recombinant vaccine that expresses human carcinoembryonic antigen. J Clin Oncol 1999:17:332-7).

[0423] In some embodiments, a Modified Vaccinia Ankara (MVA) virus can be used as a viral vector for an antigen vaccine or immunogenic composition. MVA is a member of the Orthopoxvirus family and has been generated by about 570 serial passages on chicken embryo fibroblasts of the Ankara strain of Vaccinia virus (CVA) (for review see Mayr. A., et al., Infection 3, 6-14, 1975). As a consequence of these passages, the resulting MVA virus contains 31 kilobases less genomic information compared to CVA, and is highly host-cell restricted (Meyer. H, et al., J. Gen. Virol. 72, 1031-1038, 1991). MVA is characterized by its extreme attenuation, namely, by a diminished virulence or infectious ability, but still holds an excellent immunogenicity. When tested in a variety of animal models, MVA was proven to be avirulent, even in immuno-suppressed individuals. Moreover, MVA-BN®-HER2 is a candidate immunotherapy designed for the treatment of HER-2-positive breast cancer and is currently in clinical trials. (Mandl et al., Cancer Immunol Immunother. January 2012; 61(1): 19-29). Methods to make and use recombinant MVA has been described (e.g., see U.S. Pat. Nos. 8,309,098 and 5,185,146 hereby incorporated in its entirety).

[0424] In some embodiments, recombinant viral particles of the vaccine or pharmaceutical composition are administered to patients in need thereof.

### Modification to Peptide/Polypeptide

[0425] In some embodiments, the present disclosure includes modified antigenic peptides. A modification can include a covalent chemical modification that does not alter the primary amino acid sequence of the antigenic peptide itself. Modifications can produce peptides with desired properties, for example, prolonging the in vivo half-life, increasing the stability, reducing the clearance, altering the immunogenicity or allergenicity, enabling the raising of particular antibodies, cellular targeting, antigen uptake, antigen processing, MHC affinity, MHC stability, or antigen presentation. Changes to an antigenic peptide that can be carried out include, but are not limited to, conjugation to a carrier protein, conjugation to a ligand, conjugation to an antibody, PEGylation, polysialylation HESylation, recombinant PEG mimetics, Fc fusion, albumin fusion, nanoparticle attachment, nanoparticulate encapsulation, cholesterol fusion, iron fusion, acylation, amidation, glycosylation, side chain oxidation, phosphorylation, biotinylation, the addition of a surface active material, the addition of amino acid mimetics, or the addition of unnatural amino acids.

[0426] In some embodiments, the present disclosure also includes various modifications to overcome issues associated with short plasma half-life or susceptibility to protease degradation, including conjugating or linking the polypeptide sequence to any of a variety of non-proteinaceous polymers, e.g., polyethylene glycol (PEG), polypropylene glycol, or polyoxyalkylenes (see, for example, typically via a linking moiety covalently bound to both the protein and the nonproteinaceous polymer, e.g., a PEG). Such PEG conjugated biomolecules have been shown to possess clinically useful properties, including better physical and thermal stability, protection against susceptibility to enzymatic degradation, increased solubility, longer in vivo circulating half-life and decreased clearance, reduced immunogenicity and antigenicity, and reduced toxicity.

[0427] PEGs suitable for conjugation to a polypeptide sequence are generally soluble in water at room temperature, and have the general formula R(O—CH₂—CH₂)nO-R, where R is hydrogen or a protective group such as an alkyl or an alkanol group, and where n is an integer from 1 to 1000. When R is a protective group, it generally has from 1 to 8 carbons. The PEG conjugated to the polypeptide sequence can be linear or branched. Branched PEG derivatives, “star-PEGs” and multi-armed PEGs are contemplated by the present disclosure.

[0428] The present disclosure also contemplates compositions of conjugates wherein the PEGs have different n values and thus the various different PEGs are present in specific ratios. For example, some compositions comprise a mixture of conjugates where n=1, 2, 3 and 4. In some compositions, the percentage of conjugates where n=1 is 18-25%, the percentage of conjugates where n=2 is 50-66%, the percentage of conjugates where n=3 is 12-16%, and the percentage of conjugates where n=4 is up to 5%. Such compositions can be produced by reaction conditions and purification methods know in the art. For example, cation exchange chromatography can be used to separate conjugates, and a fraction is then identified which contains the conjugate having, for example, the desired number of PEGs attached, purified free from unmodified protein sequences and from conjugates having other numbers of PEGs attached.

[0429] PEG can be bound to a polypeptide of the present disclosure via a terminal reactive group (a “spacer”). The spacer is, for example, a terminal reactive group which mediates a bond between the free amino or carboxyl groups of one or more of the polypeptide sequences and polyethylene glycol. The PEG having the spacer which can be bound to the free amino group includes N-hydroxysuccinylimide polyethylene glycol which can be prepared by activating succinic acid ester of polyethylene glycol with N-hydroxy succinylimide. Another activated polyethylene glycol which can be bound to a free amino group is 2,4-bis(O-methoxypolyethyleneglycol)-6-chloro-s-triazine which can be prepared by reacting polyethylene glycol monomethyl ether with cyanuric chloride. The activated polyethylene glycol which is bound to the free carboxyl group includes polyoxyethylenediamine.

[0430] Conjugation of one or more of the polypeptide sequences of the present disclosure to PEG having a spacer can be carried out by various conventional methods. For example, the conjugation reaction can be carried out in solution at a pH of from 5 to 10, at temperature from 4° C. to room temperature, for 30 minutes to 20 hours, utilizing a molar ratio of reagent to protein of from 4:1 to 30:1. Reaction conditions can be selected to direct the reaction towards producing predominantly a desired degree of substitution. In general, low temperature, low pH (e.g., pH=5), and short reaction time tend to decrease the number of PEGs attached, whereas high temperature, neutral to high pH (e.g., pH>7), and longer reaction time tend to increase the number of PEGs attached. Various means known in the art can be used to terminate the reaction. In some embodiments the reaction is terminated by acidifying the reaction mixture and freezing at, e.g., −20° C.

[0431] The present disclosure also contemplates the use of PEG mimetics. Recombinant PEG mimetics have been developed that retain the attributes of PEG (e.g., enhanced serum half-life) while conferring several additional advantageous properties. By way of example, simple polypeptide chains (comprising, for example, Ala, Glu, Gly, Pro, Ser and Thr) capable of forming an extended conformation similar to PEG can be produced recombinantly already fused to the peptide or protein drug of interest (e.g., Amunix's XTEN technology: Mountain View. CA). This obviates the need for an additional conjugation step during the manufacturing process. Moreover, established molecular biology techniques enable control of the side chain composition of the polypeptide chains, allowing optimization of immunogenicity and manufacturing properties.

[0432] Glycosylation can affect the physical properties of proteins and can also be important in protein stability, secretion, and subcellular localization. The present disclosure also includes compositions comprising polypeptides with glycosylation modification. Proper glycosylation can be important for biological activity. In fact, some genes from eukaryotic organisms, when expressed in bacteria (e.g., E. coli) which lack cellular processes for glycosylating proteins, yield proteins that are recovered with little or no activity by virtue of their lack of glycosylation. Addition of glycosylation sites can be accomplished by altering the amino acid sequence. The alteration to the polypeptide can be made, for example, by the addition of, or substitution by, one or more serine or threonine residues (for O-linked glycosylation sites) or asparagine residues (for N-linked glycosylation sites). The structures of N-linked and O-linked oligosaccharides and the sugar residues found in each type can be different. One type of sugar that is commonly found on both is N-acetylneuraminic acid (hereafter referred to as sialic acid). Sialic acid is usually the terminal residue of both N-linked and O-linked oligosaccharides and, by virtue of its negative charge, may confer acidic properties to the glycoprotein. Embodiments of the present disclosure comprise the generation and use of N-glycosylation variants.

[0433] The polypeptide sequences of the present disclosure can optionally be altered through changes at the DNA level, particularly by mutating the DNA encoding the polypeptide at preselected bases such that codons are generated that will translate into the desired amino acids. Another means of increasing the number of carbohydrate moieties on the polypeptide is by chemical or enzymatic coupling of glycosides to the polypeptide. Removal of carbohydrates can be accomplished chemically or enzymatically, or by substitution of codons encoding amino acid residues that are glycosylated. Chemical deglycosylation techniques are known, and enzymatic cleavage of carbohydrate moieties on polypeptides can be achieved by the use of a variety of endo- and exo-glycosidases.

[0434] Additional suitable components and molecules for conjugation include, for example, molecules for targeting to the lymphatic system, thyroglobulin; albumins such as human serum albumin (HAS); tetanus toxoid: Diphtheria toxoid; polyamino acids such as poly(D-lysine:D-glutamic acid); VP6 polypeptides of rotaviruses; influenza virus hemagglutinin, influenza virus nucleoprotein; Keyhole Limpet Hemocyanin (KLH); and hepatitis B virus core protein and surface antigen: or any combination of the foregoing.

[0435] Fusion of albumin to one or more polypeptides of the present disclosure can, for example, be achieved by genetic manipulation, such that the DNA coding for HSA, or a fragment thereof, is joined to the DNA coding for the one or more polypeptide sequences. Thereafter, a suitable host can be transformed or transfected with the fused nucleotide sequences in the form of, for example, a suitable plasmid, so as to express a fusion polypeptide. The expression can be effected in vitro from, for example, prokaryotic or eukaryotic cells, or in vivo from, for example, a transgenic organism. In some embodiments of the present disclosure, the expression of the fusion protein is performed in mammalian cell lines, for example, CHO cell lines. Transformation is used broadly herein to refer to the genetic alteration of a cell resulting from the direct uptake, incorporation and expression of exogenous genetic material (exogenous DNA) from its surroundings and taken up through the cell membrane(s). Transformation occurs naturally in some species of bacteria, but it can also be effected by artificial means in other cells. Furthermore, albumin itself can be modified to extend its circulating half-life. Fusion of the modified albumin to one or more polypeptides can be attained by the genetic manipulation techniques described above or by chemical conjugation; the resulting fusion molecule has a half-life that exceeds that of fusions with non-modified albumin. (See WO2011/051489). Several albumin-binding strategies have been developed as alternatives for direct fusion, including albumin binding through a conjugated fatty acid chain (acylation). Because serum albumin is a transport protein for fatty acids, these natural ligands with albumin—binding activity have been used for half-life extension of small protein therapeutics. For example, insulin detemir (LEVEMIR), an approved product for diabetes, comprises a myristyl chain conjugated to a genetically-modified insulin, resulting in a long-acting insulin analog.

[0436] Another type of modification provided by the present disclosure is to conjugate (e.g., link) one or more additional components or molecules at the N- and/or C-terminus of a polypeptide sequence as provided herein, such as another protein (e.g., a protein having an amino acid sequence heterologous to the subject protein), or a carrier molecule. Thus, an exemplary polypeptide sequence can be provided as a conjugate with another component or molecule.

[0437] In some embodiments, a conjugate modification as provided herein can result in a polypeptide sequence that retains activity with an additional or complementary function or activity of the second molecule. For example, a polypeptide sequence can be conjugated to a molecule, e.g., to facilitate solubility, storage, in vivo or shelf half-life or stability, reduction in immunogenicity, delayed or controlled release in vivo, etc. Other functions or activities include a conjugate that reduces toxicity relative to an unconjugated polypeptide sequence, a conjugate that targets a type of cell or organ more efficiently than an unconjugated polypeptide sequence, or a drug to further counter the causes or effects associated with a disorder or disease as set forth herein (e.g., diabetes).

[0438] A polypeptide as provided herein can also be conjugated to large, slowly metabolized macromolecules such as proteins; polysaccharides, such as sepharose, agarose, cellulose, cellulose beads; polymeric amino acids such as polyglutamic acid, polylysine; amino acid copolymers; inactivated virus particles; inactivated bacterial toxins such as toxoid from diphtheria, tetanus, cholera, leukotoxin molecules; inactivated bacteria; and dendritic cells.

[0439] Additional candidate components and molecules for conjugation to the polypeptide sequence of the present disclosure can include those suitable for isolation or purification. Particular non-limiting examples include binding molecules, such as biotin (biotin-avidin specific binding pair), an antibody, a receptor, a ligand, a lectin, or molecules that comprise a solid support, including, for example, plastic or polystyrene beads, plates or beads, magnetic beads, test strips, and membranes. Purification methods such as cation exchange chromatography can be used to separate conjugates by charge difference, which effectively separates conjugates into their various molecular weights. The content of the fractions obtained by cation exchange chromatography can be identified by molecular weight using conventional methods, for example, mass spectroscopy, SDS-PAGE, or other known methods for separating molecular entities by molecular weight.

[0440] In some embodiments, the amino- or carboxyl-terminus of a polypeptide sequence of the present disclosure can be fused with an immunoglobulin Fc region (e.g., human Fc) to form a fusion conjugate (or fusion molecule). Fc fusion conjugates have been shown to increase the systemic half-life of biopharmaceuticals, and thus the biopharmaceutical product can require less frequent administration.

[0441] Fc can bind to the neonatal Fc receptor (FcRn) in endothelial cells that line the blood vessels, and, upon binding, the Fc fusion molecule can be protected from degradation and re-released into the circulation, keeping the molecule in circulation longer. This Fc binding can be the mechanism by which endogenous IgG retains its long plasma half-life. More recent Fc-fusion technology links a single copy of a biopharmaceutical to the Fc region of an antibody to optimize the pharmacokinetic and pharmacodynamic properties of the biopharmaceutical as compared to traditional Fc-fusion conjugates.

[0442] The present disclosure also contemplates the use of other modifications, currently known or developed in the future, of the polypeptides to improve one or more properties. One such method for prolonging the circulation half-life, increasing the stability, reducing the clearance, or altering the immunogenicity or allergenicity of a polypeptide of the present disclosure can involve modification of the polypeptide sequences by hesylation, which utilizes hydroxyethyl starch derivatives linked to other molecules in order to modify the molecule's characteristics. Various aspects of hesylation are described in, for example, U.S. Patent Appln. Nos. 2007/0134197 and 2006/0258607.

[0443] In some aspects, a peptide derivative such as a tissue-specific antigen provided herein can comprise an affinity enhanced tissue-specific antigen. Such an affinity enhanced tissue-specific antigen can comprise one or more substitutions or modifications that provide enhanced immunogenicity compared to an unmodified versions of the tissue-specific antigen.

[0444] For example, an affinity enhanced tissue-specific antigen can be prepared or derived from a parent peptide, wherein affinity enhanced tissue-specific antigen contains a non-natural amino acid substituted in place of a naturally occurring amino acid residue at one or more primary anchor positions, for example at one primary anchor position, or at two primary anchor positions.

[0445] A parent peptide can be an MHCI restricted antigen and the peptide derivative can be a MHCI restricted antigen that binds at least the same MHCI molecule as the parent peptide, e.g., if the parent peptide binds HLA-A*0201, then the peptide derivative also binds HLA-A*0201. In addition, the peptide derivative may be able to trigger an expansion of T-cells that are able to bind the parent peptide when it is complexed with MHC.

[0446] The peptide derivatives may also ha % e increased immunogenicity in comparison to the parent peptide. In some embodiments, the peptide derivative exhibits at least one, or at least two, or at least three. or at least tour, or all five of the following properties.

[0447] A first property is that the peptide derivative generates a T-cell immune response that is greater than the T-cell immune response generated by the parent peptide In one embodiment, the parent peptide generates a detectable T-cell immune response, but the peptide derivative generates a T-cell immune response which is greater than the T-cell immune response generated b the parent peptide. In another embodiment, the parent peptide does not generate a detectable T-cell immune response., whereas the peptide derivative generates a T-cell immune response that can be detected. In additional embodiments, die immune response may be T-cell lysis of target cells, cytokine release, and/or T-cell degranulation.

[0448] A second property is that the peptide derivative binds to MHCI with an affinity that is higher than the affinity with which the parent peptide binds to MHCI, i.e., the peptide derivative has a lower K_{D} than the parent peptide.

[0449] A third property is that the affinity of T-cell receptors for the complex formed between MI-ICI and a peptide derivative is higher than the affinity of T-cell receptors for the complex formed between MHCI and the parent peptide. This increased affinity ma % be determined using a tetramer assay (Laugel, B., et al., 2007, J. Bicol. Chem. 282, 23799-23810; Holmberg, K., et al., 2003. J. Immunol 171.2427-2434: Yee, C., et al., 1999. J. Immunol. 162, 2227-2234).

[0450] A fourth property is that a complex formed between M1 HCl and a peptide derivative is more stable (i.e., has a slower off-rate) than a complex formed between MHCI and the parent peptide.

[0451] A fifth property is that the peptide derivative of triggers an expansion of a broader number of T-cell clones that recognize the parent peptide than are triggered by the parent peptide.

[0452] Method of Manufacturing Antigen Specific T Cells for Therapy:

[0453] Provided herein are methods for antigen specific T cell manufacturing. Provided herein are methods of preparing T cell compositions, such as therapeutic T cell compositions. For example, a method can comprise expanding or inducing antigen specific T cells. Preparing (e.g., inducing or expanding) T cells can also refer to manufacturing T cells, and broadly encompasses procedures to isolate, stimulate, culture, induce, and/or expand any type of T cells (e.g., CD4⁺ T cells and CD8⁺ T cells). In one aspect, provided herein is a method of preparing at least one antigen specific T cell comprising a T cell receptor (TCR) specific to at least one antigen peptide sequence, the method comprising incubating an APC with a population of immune cells from a biological sample depleted of cells expressing CD14 and/or CD25. In some embodiments, the method comprises preparing at least one antigen specific T cell comprising a T cell receptor (TCR) specific to at least one antigen peptide sequence, the method comprising incubating an APC with a population of immune cells from a biological sample depleted of cells expressing CD11b and/or CD19. In some embodiments, the method comprises incubating an APC with a population of immune cells from a biological sample depleted of cells expressing any CD11b and/or CD19 and/or CD14 and/or CD25 or any combination thereof.

[0454] In a second aspect, provided here is a method of preparing at least one antigen specific T cell comprising a T cell receptor (TCR) specific to at least one antigen peptide sequence, the method comprising incubating a FMS-like tyrosine kinase 3 receptor ligand (FLT3L)-stimulated APC with a population of immune cells from a biological sample.

[0455] In a third aspect, provided herein is a method of preparing a pharmaceutical composition comprising at least one antigen specific T cell comprising a T cell receptor (TCR) specific to at least one antigen peptide sequence, the method comprising: incubating FMS-like tyrosine kinase 3 receptor ligand (FLT3L) with a population of immune cells from a biological sample for a first time period; and thereafter incubating at least one T cell of the biological sample with an APC.

[0456] In a fourth aspect, provided herein is a method of preparing at least one antigen specific T cell comprising a T cell receptor (TCR) specific to at least one antigen peptide sequence, the method comprising incubating a population of immune cells from a biological sample with one or more APC preparations for one or more separate time periods of less than 28 days from incubating the population of immune cells with a first APC preparation of the one or more APC preparations, wherein at least one antigen specific memory T cell is expanded, or at least one antigen specific naïve T cell is induced.

[0457] In a fifth aspect, provided herein is a method of preparing at least one antigen specific T cell comprising a T cell receptor (TCR) specific to at least one antigen peptide sequence, the method comprising incubating a population of immune cells from a biological sample with 3 or less APC preparations for 3 or less separate time periods, wherein at least one antigen specific memory T cell is expanded or at least one antigen specific naïve T cell is induced.

[0458] In some embodiments, a method of preparing antigen specific T cells comprises a T cell receptor (TCR) specific to at least one antigen peptide sequence comprises incubating a population of immune cells from a biological sample with one or more APC preparations for one or more separate time periods, thereby stimulating T cells to become antigen specific T cells, wherein a percentage of antigen specific T cells is at least about 0.00001%, 0.00002%, 0.00005%, 0.0001%, 0.0005%,0.001%,0.005%,0.01%,0.05%, 0.1%, 0.5%, 1%, 2%, 3%, 4%, 5%, 6%, 7%, 8%, 9%, 10%, 11%, 12%, 13%, 14%, 15%, 16%, 17%, 18%, 19%, 20%, 25%, 30%, 35%, 40%, 45%, 50%, 55%, 60%, 65%, 70%, 75%, 80%, 85%, 90% or 95% of total CD4⁺ T cells, total CD8⁺ T cells, total T cells or total immune cells. In some embodiments, a method of preparing antigen specific T cells comprises a T cell receptor (TCR) specific to at least one antigen peptide sequence comprises incubating a population of immune cells from a biological sample with 3 or less APC preparations for 3 or less separate time periods, thereby stimulating T cells to become antigen specific T cells. In some embodiments, a method of preparing antigen specific T cells comprises a T cell receptor (TCR) specific to at least one antigen peptide sequence comprises incubating a population of immune cells from a biological sample with 2 or less APC preparations for 2 or less separate time periods, thereby stimulating T cells to become antigen specific T cells.

[0459] In some embodiments, provided herein is a method that comprises incubating a population of immune cells from a biological sample with one or more APC preparations for one or more separate time periods, thereby stimulating T cells to become antigen specific T cells, wherein the APC preparation is a PBMC cell population from which cells expressing one or more cell surface markers are depleted prior to antigen loading of the APC population. In some embodiments, CD14+ cells are depleted prior to antigen loading of an APC population. In some embodiments, CD25+ cells are depleted prior to antigen loading of an APC population. In some embodiments, CD11b+ cells are depleted prior to antigen loading of an APC population. In some embodiments, CD19+ cells are depleted prior to antigen loading of an APC population. In some embodiments, CD3+ cells are depleted prior to antigen loading of an APC population. In some embodiments, CD25+ cells and CD14+ cells are depleted prior to antigen loading of an APC population.

[0460] In some embodiments, CD11b+ and CD25+ cells are depleted prior to antigen loading of an APC population. In some embodiments, CD11b+ and CD14+ cells are depleted prior to antigen loading of an APC population. In some embodiments, CD11b+, CD14+ and CD25+ cells are depleted prior to antigen loading of an APC population. In some embodiments, CD11b+, and CD19+ cells are depleted prior to antigen loading of an APC population. In some embodiments, CD11b+, CD19+ and CD25+ cells are depleted prior to antigen loading of an APC population. In some embodiments, CD11b+, CD14+, CD19+ and CD25+ cells are depleted prior to antigen loading of an APC population. In some embodiments, the method comprises adding to any of the depleted APC population described above, an APC enriched cell PBMC-derived population that are depleted of CD3+ cell. In some embodiments, the APC enriched cell PBMC-derived population is depleted of CD3+ and cells depleted of any one or more of CD11b+, CD14+, CD19+, or CD25+.

[0461] In some embodiments, a biological sample comprises peripheral blood mononuclear cells (PBMCs). In some embodiments, the method comprises adding to a PBMC sample, a composition comprising one or more antigenic peptides or nucleic acids encoding the same, thereby loading the APCs within the PBMCs with antigens for antigen presentation to T cells in the PBMC.

[0462] In some embodiments, a method comprises: (a) obtaining a biological sample from a subject comprising at least one antigen presenting cell (APC): (b) enriching cells expressing CD11c from the biological sample, thereby obtaining a CD11c⁺ cell enriched sample; (c) incubating the CD11c⁺ cell enriched sample with at least one cytokine or growth factor for a first time period; (d) incubating at least one peptide with the CD11c⁺ enriched sample of (c) for a second time period, thereby obtaining an APC peptide loaded sample; (e) incubating the APC peptide loaded sample with one or more cytokines or growth factors for a third time period, thereby obtaining a matured APC sample; (f) incubating APCs of the matured APC sample with a CD11b and/or CD14 and/or CD25 depleted sample comprising PBMCs for a fourth time period; (g) incubating the PBMCs with APCs of a matured APC sample for a fifth time period; (h) incubating the PBMCs with APCs of a matured APC sample for a sixth time period; and (i) administering at least one T cell of the PBMCs to a subject in need thereof.

[0463] In some embodiments, a method comprises: (a) obtaining a biological sample from a subject comprising at least one antigen presenting cell (APC); (b) enriching cells expressing CD14 from the biological sample, thereby obtaining a CD14⁺ cell enriched sample; (c) incubating the CD14⁺ cell enriched sample with at least one cytokine or growth factor for a first time period; (d) incubating at least one peptide with the CD14⁺ enriched sample of (c) for a second time period, thereby obtaining an APC peptide loaded sample: (e) incubating the APC peptide loaded sample with one or more cytokines or growth factors for a third time period, thereby obtaining a matured APC sample; (f) incubating APCs of the matured APC sample with a CD14 and/or CD25 depleted sample comprising PBMCs for a fourth time period; (g) incubating the PBMCs with APCs of a matured APC sample for a fifth time period; (h) incubating the PBMCs with APCs of a matured APC sample for a sixth time period; and (i) administering at least one T cell of the PBMCs to a subject in need thereof.

[0464] In some embodiments, a method comprises: (a) obtaining a biological sample from a subject comprising at least one APC and at least one PBMC; (b) depleting cells expressing CD11b and/or CD19 from the biological sample, thereby obtaining a CD11b and/or CD19 cell depleted sample; (c) incubating the CD11b and/or CD19 cell depleted sample with FLT3L for a first time period; (d) incubating at least one peptide with the CD11b and/or CD19 cell depleted sample of (c) for a second time period, thereby obtaining an APC peptide loaded sample: (e) incubating the APC peptide loaded sample with the at least one PBMC for a third time period, thereby obtaining a first stimulated PBMC sample; (f) incubating a PBMC of the first stimulated PBMC sample with an APC of a matured APC sample for a fourth time period, thereby obtaining a second stimulated PBMC sample: (g) incubating a PBMC of the second stimulated PBMC sample with an APC of a matured APC sample for a fifth time period, thereby obtaining a third stimulated PBMC sample; (h) administering at least one T cell of the third stimulated PBMC sample to a subject in need thereof.

[0465] In some embodiments, a method comprises: (a) obtaining a biological sample from a subject comprising at least one APC and at least one PBMC; (b) depleting cells expressing CD11b and/or CD19 and/or CD14 and/or CD25 from the biological sample, thereby obtaining a CD11b and/or CD19 cell depleted sample; (c) incubating the CD11b and/or CD19 and/or CD14 and/or CD25 cell depleted sample with FLT3L for a first time period; (d) incubating at least one peptide with the CD11b and/or CD19 and/or CD14 and/or CD25 cell depleted sample of (c) for a second time period, thereby obtaining an APC peptide loaded sample: (e) incubating the APC peptide loaded sample with the at least one PBMC for a third time period, thereby obtaining a first stimulated PBMC sample; (f) incubating a PBMC of the first stimulated PBMC sample with an APC of a matured APC sample for a fourth time period, thereby obtaining a second stimulated PBMC sample; (g) incubating a PBMC of the second stimulated PBMC sample with an APC of a matured APC sample for a fifth time period, thereby obtaining a third stimulated PBMC sample; (h) administering at least one T cell of the third stimulated PBMC sample to a subject in need thereof.

[0466] In some embodiments, a method comprises: (a) obtaining a biological sample from a subject comprising at least one APC and at least one PBMC; (b) depleting cells expressing CD14 and/or CD25 from the biological sample, thereby obtaining a CD14 and/or CD25 cell depleted sample; (c) incubating the CD14 and/or CD25 cell depleted sample with FLT3L for a first time period; (d) incubating at least one peptide with the CD14 and/or CD25 cell depleted sample of (c) for a second time period, thereby obtaining an APC peptide loaded sample; (e) incubating the APC peptide loaded sample with the at least one PBMC for a third time period, thereby obtaining a first stimulated PBMC sample; (f) incubating a PBMC of the first stimulated PBMC sample with an APC of a matured APC sample for a fourth time period, thereby obtaining a second stimulated PBMC sample; (g) incubating a PBMC of the second stimulated PBMC sample with an APC of a matured APC sample for a fifth time period, thereby obtaining a third stimulated PBMC sample: (h) administering at least one T cell of the third stimulated PBMC sample to a subject in need thereof.

[0467] In some embodiments, a method of preparing at least one antigen specific T cell comprising a T cell receptor (TCR) specific to at least one antigen peptide sequence comprises incubating an APC with a population of immune cells from a biological sample depleted of cells expressing CD14 and/or CD25.

[0468] In some embodiments, provided herein is a method of preparing at least one antigen specific T cell comprising a T cell receptor (TCR) specific to at least one antigen peptide sequence, the method comprising incubating a population of immune cells from a biological sample with one or more APC preparations for one or more separate time periods of less than 28 days from incubating the population of immune cells with a first APC preparation of the one or more APC preparations, wherein at least one antigen specific memory T cell is expanded, or at least one antigen specific naïve T cell is induced. In some embodiments, provided herein is a method of preparing at least one antigen specific T cell comprising a T cell receptor (TCR) specific to at least one antigen peptide sequence, the method comprising incubating a population of immune cells from a biological sample with 3 or less APC preparations for 3 or less separate time periods, wherein at least one antigen specific memory T cell is expanded or at least one antigen specific naïve T cell is induced.

[0469] In some embodiments, a method of preparing antigen specific T cells comprises a T cell receptor (TCR) specific to at least one antigen peptide sequence comprises contacting a population of immune cells (e.g., PBMCs) to APCs. In some embodiments, a method of preparing antigen specific T cells comprises a T cell receptor (TCR) specific to at least one antigen peptide sequence comprises incubating a population of immune cells (e.g., PBMCs) with APCs for a time period. In some embodiments, the population of immune cells is from a biological sample. In some embodiments, the population of immune cells is from a sample (e.g., a biological sample) depleted of CD14 expressing cells. In some embodiments, the population of immune cells is from a sample (e.g., a biological sample) depleted of CD25 expressing cells. In some embodiments, the population of immune cells is from a sample (e.g., a biological sample) depleted of CD14 expressing cells and CD25 expressing cells.

[0470] In some embodiments, a method of preparing at least one antigen specific T cell comprising a T cell receptor (TCR) specific to at least one antigen peptide sequence comprises incubating a FMS-like tyrosine kinase 3 receptor ligand (FLT3L)-stimulated APC with a population of immune cells from a biological sample. In some embodiments, provided herein is a method of preparing a pharmaceutical composition comprising at least one antigen specific T cell comprising a T cell receptor (TCR) specific to at least one antigen peptide sequence, the method comprising: incubating FMS-like tyrosine kinase 3 receptor ligand (FLT3L) with a population of immune cells from a biological sample for a first time period: and thereafter incubating at least one T cell of the biological sample with an APC.

[0471] In some embodiments, a method of preparing at least one antigen specific T cell comprising a T cell receptor (TCR) specific to at least one antigen peptide sequence comprises contacting a population of immune cells from a sample (e.g., a biological sample) with FMS-like tyrosine kinase 3 receptor ligand (FLT3L). In some embodiments, a method of preparing at least one antigen specific T cells comprises a T cell receptor (TCR) specific to at least one antigen peptide sequence comprises contacting a population of immune cells from a sample (e.g., a biological sample) with FMS-like tyrosine kinase 3 receptor ligand (FLT3L)-stimulated APCs. In some embodiments, a method of preparing at least one antigen specific T cells comprises a T cell receptor (TCR) specific to at least one antigen peptide sequence comprises incubating a population of immune cells from a sample (e.g., a biological sample) with FMS-like tyrosine kinase 3 receptor ligand (FLT3L)-stimulated APCs. In some embodiments, a method of preparing a pharmaceutical composition comprising at least one antigen specific T cell comprising a T cell receptor (TCR) specific to at least one antigen peptide sequence comprises incubating FMS-like tyrosine kinase 3 receptor ligand (FLT3L) with a population of immune cells from a biological sample (e.g., for a time period): and then contacting T cells of the biological sample to APCs. In some embodiments, a method of preparing at least one antigen specific T cell comprising a T cell receptor (TCR) specific to at least one antigen peptide sequence comprises contacting a population of immune cells from a sample (e.g., a biological sample) to one or more APC preparations. In some embodiments, a method of preparing at least one antigen specific T cell comprising a T cell receptor (TCR) specific to at least one antigen peptide sequence comprises incubating a population of immune cells from a sample (e.g., a biological sample) to one or more APC preparations for one or more separate time periods. In some embodiments, a method of preparing at least one antigen specific T cell comprising a T cell receptor (TCR) specific to at least one antigen peptide sequence comprises incubating a population of immune cells from a sample (e.g., a biological sample) to one or more APC preparations for 1, 2, 3, 4, 5, 6, 7, 8, 9 or 10 separate time periods. In some embodiments, the one or more separate time periods is less than 28 days calculated from incubating the population of immune cells with a first APC preparation of the one or more APC preparations.

[0472] In some embodiments, a method of preparing antigen specific T cells comprises a T cell receptor (TCR) specific to at least one antigen peptide sequence comprises incubating a population of immune cells to APCs for a time period, wherein the population of immune cells is from a biological sample comprising PBMCs. In some embodiments, a method of preparing antigen specific T cells comprises a T cell receptor (TCR) specific to at least one antigen peptide sequence comprises incubating a population of immune cells to APCs for a time period, wherein the population of immune cells is from a biological sample depleted of CD14 and/or CD25 expressing cells.

[0473] In some embodiments, a method of preparing antigen specific T cells comprising a T cell receptor (TCR) specific to at least one antigen peptide sequence comprises incubating a population of immune cells from a biological sample with FMS-like tyrosine kinase 3 receptor ligand (FLT3L)-stimulated APCs for a time period.

[0474] In some embodiments, a method of preparing a pharmaceutical composition comprising antigen specific T cells comprising a T cell receptor (TCR) specific to at least one antigen peptide sequence comprises incubating FMS-like tyrosine kinase 3 receptor ligand (FLT3L) with a population of immune cells from a biological sample; and then contacting T cells of the biological sample with APCs.

[0475] In some embodiments, a method of preparing antigen specific T cells comprising a T cell receptor (TCR) specific to at least one antigen peptide sequence comprises incubating a population of immune cells from a biological sample with one or more APC preparations for one or more separate time periods, thereby inducing or expanding antigen specific T cells, wherein the one or more separate time periods is less than 28 days calculated from incubating the population of immune cells with a first APC preparation of the one or more APC preparations. In some embodiments, incubating a population of immune cells from a biological sample with one or more APC preparations for one or more separate time periods is performed in a medium containing IL-7, IL-15, or a combination thereof. In some embodiments, the medium further comprises an indoleamine 2,3-dioxygenase-I (IDO) inhibitor, an anti-PD-1 antibody, IL-12, or a combination thereof. The IDO inhibitor can be epacadostat, navoximod, 1-Methyltryptophan, or a combination thereof. In some embodiments, the IDO inhibitor may increase the number of antigen-specific CD8⁺ cells. In some embodiments, the IDO inhibitor may maintain the functional profile of memory CD8⁺ T cell responses. The PD-1 antibody may increase the absolute number of antigen-specific memory CD8+ T cell responses. The PD-1 antibody may increase proliferation rate of the cells treated with such antibody. The additional of IL-12 can result in an increase of antigen-specific cells and/or an increase in the frequency of CD8⁺ T cells.

[0476] In some embodiments, a method of preparing antigen specific T cells comprising a T cell receptor (TCR) specific to at least one antigen peptide sequence comprises incubating a population of immune cells comprising from a biological sample with one or more APC preparations for one or more separate time periods, thereby expanding or inducing antigen specific T cells, wherein a percentage of antigen specific T cells, antigen specific CD4⁺ T cells, or antigen specific CD8⁺ T cells is at least about 0.00001%, 0.00002%, 0.00005%, 0.0001%, 0.0005%, 0.001%, 0.005%, 0.01%, 0.05%, 0.1%, 0.5%, 1%, 2%, 3%, 4%, 5%, 6%, 7%,8%,9/, 10%., 11%, 12%, 13%, 14%, 15%, 16%, 17%, 18%, 19%, 20%, 25%, 30%, 35%, 40%, 45%, 50%, 55%, 60%, 65%, 70%, 75%, 80%, 85%, 90% or 95% of total T cells, total CD4⁺ T cells, total CD8⁺ T cells, total immune cells, or total cells.

[0477] In some embodiments, a method of preparing antigen specific T cells comprises a T cell receptor (TCR) specific to at least one antigen peptide sequence comprises incubating a population of immune cells from a biological sample with 3 or less APC preparations for 3 or less separate time periods, thereby stimulating T cells to become antigen specific T cells.

[0478] In some embodiments, the population of immune cells is from a biological sample depleted of CD14 and/or CD25 expressing cells. In some embodiments, the APCs are FMS-like tyrosine kinase 3 receptor ligand (FLT3L)-stimulated APCs. In some embodiments, the APCs comprise one or more APC preparations. In some embodiments, the APC preparations comprise 3 or less APC preparations. In some embodiments, the APC preparations are incubated with the immune cells sequentially within one or more separate time periods.

[0479] In some embodiments, the biological sample is from a subject. In some embodiments, the subject is a human. For example, the subject can be a patient or a donor. In some embodiments, the subject has a disease or disorder. In some embodiments, the disease or disorder is cancer. In some embodiments, the antigen specific T cells comprise CD4⁺ and/or CD8⁺ T cells. In some embodiments, the antigen specific T cells comprise CD4 enriched T cells and/or CD8 enriched T cells. For example, a CD4⁺ T cell and/or CD8⁺ T cell can be isolated from, enriched from, or purified from a biological sample from a subject comprising PBMCs. In some embodiments, the antigen specific T cells are naïve CD4⁺ and/or naïve CD8⁺ T cells. In some embodiments, the antigen specific T cells are memory CD4⁺ and/or memory CD8⁺ T cells.

[0480] In some embodiments, the at least one antigen peptide sequence comprises a mutation selected from (A) a point mutation and the cancer antigen peptide binds to the HLA protein of the subject with an IC₅₀ less than 500 nM and a greater affinity than a corresponding wild-type peptide, (B) a splice-site mutation, (C) a frameshift mutation, (D) a read-through mutation, (E) a gene-fusion mutation, and combinations thereof. In some embodiments, each of the at least one antigen peptide sequence binds to a protein encoded by an HLA allele expressed by the subject. In some embodiments, each of the at least one antigen peptide sequence comprises a mutation that is not present in non-cancer cells of the subject. In some embodiments, each of the at least one antigen peptide sequences is encoded by an expressed gene of the subject's cancer cells. In some embodiments, one or more of the at least one antigen peptide sequence has a length of from 8-50 naturally occurring amino acids. In some embodiments, the at least one antigen peptide sequence comprises a plurality of antigen peptide sequences. In some embodiments, the plurality of antigen peptide sequences comprises from 2-50, 3-50, 4-50, 5-5-, 6-50, 7-50, 8-50, 9-50, or 10-50 antigen peptide sequences.

[0481] In some embodiments, the APCs comprise APCs loaded with one or more antigen peptides comprising one or more of the at least one antigen peptide sequence. In some embodiments, the APCs are autologous APCs or allogenic APCs. In some embodiments, the APCs comprise dendritic cells (DCs).

[0482] In some embodiments, a method comprises depleting CD14 and/or CD25 expressing cells from the biological sample. In some embodiments, depleting CD14⁺ cells comprises contacting a CD14 binding agent to the APCs. In some embodiments, the APCs are derived from CD14⁺ monocytes. In some embodiments, the APCs are enriched from the biological sample. For example, an APC can be isolated from, enriched from, or purified from a biological sample from a subject comprising PBMCs.

[0483] In some embodiments, the APCs are stimulated with one or more cytokines or growth factors. In some embodiments, the one or more cytokines or growth factors comprise GM-CSF, IL-4, FLT3L, or a combination thereof. In some embodiments, the one or more cytokines or growth factors comprise IL-4, IFN-γ, LPS, GM-CSF, TNF-α, IL-1β, PGE1, IL-6, IL-7 or a combination thereof.

[0484] In some embodiments, the APCs are from a second biological sample. In some embodiments, the second biological sample is from the same subject.

[0485] In some embodiments, a percentage of antigen specific T cells in the method is at least about 1%, 2%, 3%, 4%, 5%, 6%, 7%, 8%, 9%, 10%, 11%, 12%, 13%, 14%, 15%, 16%, 17%, 18%, 19%, or 20% of total T cells or total immune cells. In some embodiments, a percentage of antigen specific T cells in the method is from about 0.1% to about 5%, from about 5% to 10%, from about 10% to 15%, from about 15% to 20%, from about 20% to 25%, from about 25% to 30%, from about 30% to 35%, from about 35% to about 40%, from about 40% to about 45%, from about 45% to about 50%, from about 50% to about 55%, from about 55% to about 60%, from about 60% to 65%, or from about 65% to about 70% of total T cells or total immune cells. In some embodiments, a percentage of antigen specific CD8⁺ T cells in the method is at least about 1%, 2%, 3%, 4%, 5%, 6%, 7%, 8%, 9%, 10%, 11%, 12%, 13%, 14%, 15%, 16%, 17%, 18%, 19%, or 20% of total T cells or total immune cells. In some embodiments, a percentage of antigen specific naïve CD8⁺ T cells in the method is at least about 1%, 2%, 3%, 4%, 5%, 6%, 7%, 8%, 9%, 10%, 11%, 12%, 13%, 14%, 15%, 16%, 17%, 18%, 19%, or 20% of total T cells or total immune cells. In some embodiments, a percentage of antigen specific memory CD8 T cells in the method is at least about 1%, 2%, 3%, 4%, 5%, 6%, 7%, 8%, 9%, 10%, 11%, 12%, 13%, 14%, 15%, 16%, 17%, 18%, 19%, or 20% of total T cells or total immune cells. In some embodiments, a percentage of antigen specific CD4⁺ T cells in the method is at least about 1%, 2%, 3%, 4%, 5%, 6%, 7%, 8%, 9%, 10%, 11%, 12%, 13%, 14%, 15%, 16%, 17%, 18%, 19%, or 20% of total T cells or total immune cells. In some embodiments, a percentage of antigen specific CD4⁺ T cells in the method is at least about 1%, 2%, 3%, 4%, 5%, 6%, 7%, 8%, 9%, 10%, 11%, 12%, 13%, 14%, 15%, 16%, 17%, 18%, 19%, or 20% of total T cells or total immune cells. In some embodiments, a percentage of antigen specific T cells in the biological sample is at most about 0.5%, 1%, 2%, 3%, 4%, 5%, 6%, 7%, 8%, 9%, 10%, 11%, 12%, 13%, 14%, 15%, 16%, 17%, 18%, 19%, or 20%. In some embodiments, a percentage of antigen specific CD8⁺ T cells in the biological sample is at most about 0.5%, 1%, 2%, 3%, 4%, 5%, 6%, 7%, 8%, 9%, 10%, 11%, 12%, 13%, 14%, 15%, 16%, 17%, 18%, 19%, or 20%. In some embodiments, a percentage of antigen specific naïve CD8⁺ T cells in the biological sample is at most about 0.5%, 1%, 2%, 3%, 4%, 5%, 6%, 7%, 8%, 9%, 10%, 11%, 12%, 13%, 14%, 15%, 16%, 17%, 18%, 19%, or 20%. In some embodiments, a percentage of antigen specific memory CD8⁺ T cells in the biological sample is at most about 0.5%, 1%, 2%, 3%, 4%, 5%, 6%, 7%, 8%, 9%, 10%, 11%, 12%, 13%, 14%, 15%, 16%, 17%, 18%, 19%, or 20%. In some embodiments, a percentage of antigen specific CD4⁺ T cells in the biological sample is at most about 0.5%, 1%, 2%, 3%, 4%, 5%, 6%, 7%, 8%, 9%, 10%, 11%, 12%, 13%, 14%, 15%, 16%, 17%, 18%, 19%, or 20%.

[0486] In some embodiments, a biological sample is freshly obtained from a subject or is a frozen sample.

[0487] In some embodiments, a method comprises incubating one or more of the APC preparations with a first medium comprising at least one cytokine or growth factor for a first time period. In some embodiments, the first time period is at lease 1, 2, 3, 4, 5, 6, 7, 8, 9, 10, 11, 12, 13, 14, 15, 16, or 17, or 18 days. In some embodiments, the first time period is no more than 2, 3, 4, 5, 6, 7, 8, 9, 10, 11, 12, 13, 14, 15, 16, 17, or 18 days. In some embodiments, the first time period is at least 1, 2 3, 4, 5, 6, 7, 8, or 9 days.

[0488] In some embodiments, the first time period is no more than 3, 4, 5, 6, 7, 8, 9, or 10 days. In some embodiments, the at least one cytokine or growth factor comprises GM-CSF, IL-4, FLT3L, TNF-α, IL-1β, PGE1, IL-6, IL-7, IFN-γ, LPS, IFN-α, R848, LPS, ss-ma40, poly I:C, or any combination thereof.

[0489] In some embodiments, a method comprises incubating one or more of the APC preparations with at least one peptide for a second time period. In some embodiments, the second time period is no more than 1 hour.

[0490] In some embodiments, a method comprises incubating one or more of the APC preparations with a second medium comprising one or more cytokines or growth factors for a third time period, thereby obtaining matured APCs. In some embodiments, the one or more cytokines or growth factors comprises GM-CSF (granulocyte macrophage colony-stimulating factor), IL-4, FLT3L, IFN-γ, LPS, TNF-α, IL-1β, PGE1, IL-6, IL-7, IFN-α, R848 (resiquimod), LPS, ss-rna40, poly I:C, CpG, or a combination thereof. In some embodiments, the third time period is no more than 2, 3, 4, 5, 6, 7, 8, 9, 10, 11, 12, 13, 14, 15, 16, 17, or 18 days. In some embodiments, the third time period is at least 1, 2, 3, 4, 5, 6, 7, 8, 9, 10, 11, 12, 13, 14, 15, 16, or 17 days. In some embodiments, the third time period is no more than 2, 3, 4, or 5 days. In some embodiments, the third time period is at least 1, 2, 3, or 4 days.

[0491] In some embodiment, the method further comprises removing the one or more cytokines or growth factors of the second medium after the third time period and before a start of the fourth time period.

[0492] Antigen Loaded PBMCs for T Cell Induction In Vitro

[0493] In some embodiments, the methods provided herein comprise isolating PBMCs from a human blood sample, and directly loading the PBMCs with antigens. PBMCs directly contacted with antigens can readily take up antigens by phagocytosis and present antigens to T cells that may be in the culture or added to the culture. In some embodiments, the methods provided herein comprise isolating PBMCs from a human blood sample, and nucleofecting or electroporating a polynucleotide, such as an mRNA, that encodes one or more antigens into the PBMCs. In some embodiments, antigens delivered to PBMCs, instead of antigen presenting cells maturing to DCs, provides a great advantage in terms of time and manufacturing efficiency. The PBMCs may be further depleted of one or more cell types. In some embodiments, the PBMCs may be depleted of CD3+ cells for an initial period of antigen loading and the CD3+ cells returned to the culture for the PBMCs to stimulate the CD3+ T cells. In some embodiments, the PBMCs may be depleted of CD25+ cells. In some embodiments, the PBMCs may be depleted of CD14+ cells. In some embodiments, the PBMCs may be depleted of CD19+ cells. In some embodiments, the PBMCs may be depleted of both CD14 and CD25 expressing cells. In some embodiments, CD11b+ cells are depleted from the PBMC sample before antigen loading. In some embodiments, CD11b+ and CD25+ cells are depleted from the PBMC sample before antigen loading.

[0494] In some embodiments, the PBMCs isolated from a human blood sample may be handled as minimally as possible prior to loading with antigens. Increased handling of PBMCs, for example freezing and thawing cells, multiple cell depletion steps, etc., may impair cell health and viability.

[0495] In some embodiments, the PBMCs are allogeneic to the subject of therapy. In some embodiments the PBMCs are allogeneic to the subject of adoptive cell therapy with antigen specific T cells.

[0496] In some embodiments, the PBMCs are HLA-matched for the subject of therapy. In some embodiments, the PBMCs are allogeneic, and matched for the subject's HLA subtypes, whereas the CD3+ T cells are autologous. The PBMCs are loaded with the respective antigens (e.g. derived from analysis of a peptide presentation analysis platform such as RECON), cocultured with subject's PBMC comprising T cells in order to stimulate antigen specific T cells.

[0497] In some embodiments, mRNA is used as the immunogen for uptake and antigen presenting. One advantage of using mRNA over peptide antigens to load PBMCs is that RNA is self adjuvanting, and does not require additional adjuvants. Another advantage of using mRNA is that the peptides are processed and presented endogenously. In some embodiments, the mRNA comprises shortmer constructs, encoding 9-10 amino acid peptides comprising an epitope. In some embodiments, the mRNA comprises longmer constructs, encoding bout 25 amino acid peptides. In some embodiments, the mRNA comprises a concatenation of multiple epitopes. In some embodiments, the concatemers may comprise one or more epitopes from the same antigenic protein. In some embodiments, the concatemers may comprise one or epitopes from several different antigenic proteins. Several embodiments are described in the Examples section. Antigen loading of PBMCs by antigen loading may comprise various mechanisms of delivery ad incorporation of nucleic acid into the PBMCs. In some embodiments, the delivery or mechanism of incorporation includes transfection, electroporation, nucleofection, chemical delivery, for example, lipid encapsulated or liposome mediated delivery.

[0498] Use of antigen loaded PBMCs to stimulate T cells saves the maturation time required in a method that generates DCs from a PBMC sample prior to T cell stimulation. In some embodiments, use of antigen loaded PBMCs, for example, mRNA loaded PBMCs as APCs reduces the total manufacturing time by 1, 2, 3, 4, 5, 6, 7, 8, 9, or 10 days. In some embodiments, use of antigen loaded PBMCs as APCs reduces the total manufacturing time by 3 days. In some embodiments, use of antigen loaded PBMCs as APCs reduces the total manufacturing time by 4 days. In some embodiments, use of antigen loaded PBMCs as APCs reduces the total manufacturing time by 5 days. In some embodiments, use of antigen loaded PBMCs as APCs reduces the total manufacturing time by 6 days. In some embodiments, use of antigen loaded PBMCs as APCs reduces the total manufacturing time by 7 days.

[0499] In some embodiments, use of mRNA as antigen may be preferred because it is easy to design and manufacture nucleic acids, and transfect the PBMCs. In some embodiments, mRNA loaded PBMCs can stimulate T cells and generate higher antigen specific T cells. In some embodiments, mRNA loaded PBMCs can stimulate T cells and generate higher yield of antigen specific T cells. In some embodiments, mRNA loaded PBMCs can stimulate T cells and generate antigen specific T cells that have higher representation of the input antigens, i.e., reactive to diverse antigens. In some embodiments, mRNA loaded PBMCs can stimulate T cells that have at least 1, 2, 3, 4, 5, 6, 7, 8, 9, 10 or more antigen reactivity in the pool of expanded cells. In some embodiments, the mRNA loaded PBMCs can stimulate T cells that have at least 1, 2, 3, 4, 5, 6, 7, 8, 9, 10 or more antigen reactivity than conventional antigen loaded APCs (such as peptide loaded DCs).

### EXAMPLES

[0500] The examples provided below are for illustrative purposes only and do not to limit the scope of the claims provided herein.

### Example 1. Identification of Tissue-Specific Gene Expression and Tissue-Specific Antigen

[0501] Examples 1 and 2 exemplify-the methods of identification of tissue-specific antigen or epitope sequence according to some embodiments of the present disclosure. Here, systematic efforts were taken to discover tissue-specific antigens capable of eliciting a TCR-mediated response.

[0502] As a first step, gene expression in cancer and non-cancer tissue types profiled in the TCGA and GTEX data sets was screened through by a bioinformatic program. Each tissue type was categorized as essential or non-essential. All tumor tissues were considered non-essential whereas normal tissues could be considered essential (e.g. brain, colon, etc.) or non-essential (e.g. ovary, prostate, thyroid, etc). This process uncovered a small set of genes whose expression profile was restricted in the desired way. FIGS. 1-72 are boxplots illustrating expression levels of these genes ANKRD30A, COL10A1, CTCFL, PPIAL4G, POTEE, DLL3, MMP13, SSX1, DCAF4L2, MAGEA4, MAGEA11, MAGEC2, MAGEA12, PRAME, CLDN6, EPYC, KLK3, KLK2, KLK4, TGM4, POTEG, RLN1, POTEH, SLC45A2, TSPAN10, PAGE5, CSAG1, PRDM7, TG, TSHR, RSPH6A, SCXB, HIST1H4K, ALPPL2, PRM2, PRM1, TNP1, LELP1, HMGB4, AKAP4, CETN1, UBQLN3, ACTL7A, ACTL9, ACTRT2, PGK2, C2orf53, KIF21B, ADAD1, SPATA8, CCDC70, TPD52L3, ACTL71B, DMRTB1, SYCN, CELA2A, CELA21B, PNLIPRP1, CTRC-AMY2A, SERPINI2, RBPJL, AQP12A, IAPP, KIRREL2, G6PC2, AQP12B, CYP11B1, CYP11B2, STAR, CYP11A1, and MC2R in a number of different normal tissues and tumors, respectively.

[0503] As illustrated in the plots, these gene were identified as specific to the respective tissues as indicated on the top of each plot.

[0504] Next, the sequences of the genes identified in the first step were scanned through by the same bioinformatic program to find short peptide sequences with high likelihood of being presented on a common MHC I allele. Table 1A summarizes the findings on tissue-specific antigens and their corresponding cancer type, in which the respective tissue-specific gene from which the respective tissue-specific antigen was identified has relatively high expression level.

[0505] To validate this exemplary approach, a bioinformatics approach was used to identify of tissue-specific antigens. Table 2 summarizes a list of tissue-specific antigens ranked based on use of two different exemplary, algorithms that predict binding affinity of the peptides to HLA molecules. As can be seen in Table 2, for each peptide, their rank ranges by both programs were comparable. The total number of peptides in the data set was 8,962.

TABLE 2
Predictions of candidate tissue-specific antigens using two different algorithms

| Peptide | SEQ ID | | Rank range peptides | Rank range peptides fall |
|---|---|---|---|---|
| Sequence | NO: | Allele | fall within (algorithm 1) | within (algorithm 2) |
| YAITFAMRL | 8711 | HLA- | 0001-0100 | 0001-0100 |
| | | C03:04 | | |
| SLYEHLVNL | 6852 | HLA- | 0001-0100 | 0001-0100 |
| | | A02:01 | | |
| HTYPFGWYQK | 7726 | HLA- | 0001-0100 | 0001-0100 |
| | | A11:01 | | |
| FAINSEMFL | 2980 | HLA- | 0001-0100 | 0001-0100 |
| | | C03:04 | | |
| RPAPPGRYL | 7008 | HLA- | 0001-0100 | 0001-0100 |
| | | B07:02 | | |
| FVISGVLTL | 1668 | HLA- | 0001-0100 | 0001-0100 |
| | | C03:04 | | |
| SSLYSYFQK | 7179 | HLA- | 0050-0150 | 0050-0150 |
| | | A11:01 | | |
| RLFFRVCLK | 2641 | HLA- | 0050-0150 | 0050-0150 |
| | | A03:01 | | |
| VLTSGIVFV | 1665 | HLA- | 0150-0250 | 0150-0250 |
| | | A02:01 | | |
| YAGNNMHSL | 2066 | HLA- | 0200-0300 | 0200-0300 |
| | | C03:04 | | |
| RLFRTKTWK | 2229 | HLA- | 0250-0350 | 0250-0350 |
| | | A03:01 | | |
| VASDMMVSL | 575 | HLA- | 0300-0400 | 0300-0400 |
| | | C03:04 | | |
| YRKPGISLL | 8045 | HLA- | 0350-0450 | 0350-0450 |
| | | C07:02 | | |
| RLYFGTSGY | 7725 | HLA- | 0400-0500 | 0400-0500 |
| | | A03:01 | | |
| FIANLPPEL | 6601 | HLA- | 0400-0500 | 0400-0500 |
| | | C03:04 | | |
| SYPPLHEWAF | 4489 | HLA- | 0450-0550 | 0450-0550 |
| | | A24:02 | | |
| FAGILTTVL | 8323 | HLA- | 0550-0650 | 0550-0650 |
| | | C03:04 | | |
| VLDGLDVLL | 6098 | HLA- | 0800-0900 | 0800-0900 |
| | | A02:01 | | |
| YRYLCISHL | 7252 | HLA- | 1100-1200 | 1100-1200 |
| | | C07:02 | | |
| YMIPAKTLVQV | 2220 | HLA- | 1100-1200 | 1100-1200 |
| | | A02:01 | | |
| CVDAEGMEVY | 7629 | HLA- | 1300-1400 | 1300-1400 |
| | | A01:01 | | |
| HLMQKFEKV | 7691 | HLA- | 1350-1450 | 1350-1450 |
| | | A02:01 | | |
| IAHDLRLLL | 1262 | HLA- | 1550-1650 | 1550-1650 |
| | | C03:04 | | |
| VTLPPFMCNK | 7382 | HLA- | 1650-1750 | 1650-1750 |
| | | A03:01 | | |
| SSFSTTINY | 4573 | HLA- | 1800-1900 | 1800-1900 |
| | | A11:01 | | |
| LSDQAVLAL | 287 | HLA- | 1850-1950 | 1850-1950 |
| | | C03:04 | | |
| FLQQPEDLV | 3335 | HLA- | 2000-2100 | 2000-2100 |
| | | A02:01 | | |
| NYLSLPRPR | 1229 | HLA- | 2100-2200 | 2100-2200 |
| | | A33:03 | | |
| LYRDTGLVK | 1909 | HLA- | 2150-2250 | 2150-2250 |
| | | A30:01 | | |
| FSGNQVWRY | 4916 | HLA- | 2150-2250 | 2150-2250 |
| | | A01:01 | | |
| MRLCWAWEL | 1074 | HLA- | 2350-2450 | 2350-2450 |
| | | C07:01 | | |
| YAYASGNL | 6947 | HLA- | 2450-2550 | 2450-2550 |
| | | C03:04 | | |
| DIFIVYDTR | 8250 | HLA- | 2600-2700 | 2600-2700 |
| | | A33:03 | | |
| STFTETTLY | 7635 | HLA- | 2600-2700 | 2600-2700 |
| | | A01:01 | | |
| AMILPSSSL | 2185 | HLA- | 2750-2850 | 2750-2850 |
| | | C03:04 | | |
| TMDDDTAVLV | 5305 | HLA- | 2750-2850 | 2750-2850 |
| | | A02:01 | | |
| TFFFDPENF | 2243 | HLA- | 2800-2900 | 2800-2900 |
| | | A24:02 | | |
| RLHDGIADI | 4931 | HLA- | 2850-2950 | 2850-2950 |
| | | A02:01 | | |
| YRAYYTFLNF | 2999 | HLA- | 3100-3200 | 3100-3200 |
| | | C07:02 | | |
| SYKSFESDK | 5233 | HLA- | 3200-3300 | 3200-3300 |
| | | A30:01 | | |
| AYYTFLNFM | 3005 | HLA- | 3250-3350 | 3250-3350 |
| | | C07:02 | | |
| GPQNDGKQL | 7403 | HLA- | 3500-3600 | 3500-3600 |
| | | B07:02 | | |
| NIKHHYCYV | 227 | HLA- | 3500-3600 | 3500-3600 |
| | | A30:01 | | |
| NRGQRLLAF | 1360 | HLA- | 3500-3600 | 3500-3600 |
| | | C07:02 | | |
| APDMSRML | 1518 | HLA- | 4300-4400 | 4300-4400 |
| | | B07:02 | | |
| IYAGNNMHSL | 2016 | HLA- | 4400-4500 | 4400-4500 |
| L | | A24:02 | | |
| RALGFEPRK | 1591 | HLA- | 4400-4500 | 4400-4500 |
| | | A03:01 | | |
| VPNKALEL | 908 | HLA- | 4450-4550 | 4450-4550 |
| | | B07:02 | | |
| SAWSPTLPL | 7511 | HLA- | 4600-4700 | 4600-4700 |
| | | C01:02 | | |
| SSCPPQPCTK | 4298 | HLA- | 4600-4700 | 4600-4700 |
| | | A30:01 | | |
| GPGSGPLLRL | 2042 | HLA- | 4700-4800 | 4700-4800 |
| | | B07:02 | | |
| SVSESDTIR | 4077 | HLA- | 4800-4900 | 4800-4900 |
| | | A33:03 | | |
| SVVQVAKAT | 3039 | HLA- | 4950-5050 | 4950-5050 |
| GK | | A11:01 | | |
| FQQELALLK | 5025 | HLA- | 5150-5250 | 5150-5250 |
| | | A03:01 | | |
| RALCVIALLV | 1711 | HLA- | 5200-5300 | 5200-5300 |
| | | B13:02 | | |
| LTSGIVFVI | 1712 | HLA- | 5300-5400 | 5300-5400 |
| | | B13:02 | | |
| LAFLVLEAV | 8800 | HLA- | 5350-5450 | 5350-5450 |
| | | B13:02 | | |
| FTREFLGAL | 6759 | HLA- | 5600-5700 | 5600-5700 |
| | | B46:01 | | |
| DRRCQLNIL | 5594 | HLA- | 5750-5850 | 5750-5850 |
| | | C07:01 | | |
| RLFDDDETGK | 1583 | HLA- | 6200-6300 | 6200-6300 |
| I | | A02:01 | | |
| AAMANPRAL | 8920 | HLA- | 6250-6350 | 6250-6350 |
| | | B46:01 | | |
| LFHPEDTGQV | 3827 | HLA- | 6450-6550 | 6450-6550 |
| F | | A24:02 | | |
| QLSEEQNTGI | 5480 | HLA- | 6550-6650 | 6550-6650 |
| | | A02:01 | | |
| FTSFQYPEF | 8324 | HLA- | 6600-6700 | 6600-6700 |
| | | B46:01 | | |
| LSDYKEKQIL | 5721 | HLA- | 6950-7050 | 6950-7050 |
| KV | | A01:01 | | |
| LAIPLTDVKF | 8330 | HLA- | 6950-7050 | 6950-7050 |
| | | B46:01 | | |
| PSCLKKLLQR | 4318 | HLA- | 7200-7300 | 7200-7300 |
| | | A33:03 | | |
| CQPSCLKKL | 4287 | HLA- | 7250-7350 | 7250-7350 |
| | | C07:01 | | |
| FSRAVAAKW | 6763 | HLA- | 7300-7400 | 7300-7400 |
| | | B46:01 | | |
| HRDFSGHPNF | 5674 | HLA- | 7350-7450 | 7350-7450 |
| | | C04:01 | | |
| MSATTVSSL | 1932 | HLA- | 7550-7650 | 7550-7650 |
| | | C04:01 | | |
| KLLQRCFEK | 4285 | HLA- | 7800-7900 | 7800-7900 |
| | | A02:01 | | |
| KLGFKVTLP | 7377 | HLA- | 7800-7900 | 7800-7900 |
| | | A02:01 | | |
| GVACKGREQL | 7283 | HLA- | 8200-8300 | 8200-8300 |
| | | A02:01 | | |
| ACWPAFTVL | 1885 | HLA- | 8300-8400 | 8300-8400 |
| | | A24:02 | | |
| RHNVICQLL | 5775 | HLA- | 8300-8400 | 8300-8400 |
| | | B07:02 | | |
| RAMRCCRPRY | 6370 | HLA- | 8450-8550 | 8450-8550 |
| RP | | B13:02 | | |
| RHNVICQL | 5868 | HLA- | 8600-8700 | 8600-8700 |
| | | B07:02 | | |
| SKSRSPHKGV | 8445 | HLA- | 8750-8850 | 8750-8850 |
| | | A02:01 | | |
| RYYRQRQRS | 6327 | HLA- | 8800-8900 | 8800-8900 |
| | | A02:01 | | |
| SCQTRRRAM | 6323 | HLA- | 8850-8950 | 8850-8950 |
| | | A02:01 | | |

### Example 2. Confirmation of HLA-Binding Affinity and Immunogenicity

[0506] The following example demonstrates quantification of binding affinities of HLA class I and class II peptides (HLA binding assays), and test of the ability of each test peptide to expand T cells (immunogenicity assays). Experimental protocol described below are exemplary and non-limiting, other protocols following similar principle can also be used to test HLA binding affinity and immunogenicity of the peptide as described herein.

[0507] HLA binding assays can be performed with peptides that are either motif-bearing or not motif-bearing. An exemplary detailed description of the protocol utilized to measure the binding stability of peptides to Class I MHC has been published (Harndahl et al. J Immunol Methods. 374:5-12, 2011). Briefly, synthetic genes encoding biotinylated MHC-I heavy and light chains are expressed in E. coli and purified from inclusion bodies using standard methods. The light chain (β2m) is radio-labeled with iodine (1251), and combined with the purified MHC-I heavy chain and peptide of interest at 18° C. to initiate pMHC-1 complex formation. These reactions are carried out in streptavidin coated microplates to bind th biotinylated MHC-T heavy chains to the surface and allow measurement of radiolabeled light chain to monitor complex formation. Dissociation is initiated by addition of higher concentrations of unlabeled light-chain and incubation at 37° C. Stability is defined as the length of time in hours it takes for half of the complexes to dissociate, as measured by scintillation counts

[0508] Live cell/flow cytometry-based assays can also be used, e.g., an assay utilizing a TAP-deficient hybridoma cell line T2 (American Type Culture Collection (ATCC Accession No. CRL-1992). Manassas, Va.). TAP deficiency in this cell line leads to inefficient loading of MHCI in the ER and an excess of empty MHCIs. Salter and Cresswell, EMBO J. 5:943-49 (1986); Salter, Immunogenetics 21:23546 (1985). Empty MHCIs are highly unstable and short-lived. When T2 cells are cultured at reduced temperatures, empty MHCIs appear transiently on the cell surface, where they can be stabilized by exogenous addition of MHCI-binding peptides. To perform this binding assay, peptide-receptive MHCIs were induced by culturing aliquots of 107 T2 cells overnight at 26° C. in serum free AIM-V medium alone, or in medium containing escalating concentrations (0.1 to 100 μM) of peptide. Cells were then washed twice with PBS, and subsequently incubated with a fluorescent tagged HLA-A0201-specific monoclonal antibody. BB7.2, to quantify cell surface expression. Samples were acquired on a FACS Calibur instrument (Becton Dickinson) and the mean fluorescence intensity (MFI) determined using the accompanying Cellquest software.

[0509] Immunogenicity assays are used to test the ability of each test peptide to expand T cells. Mature professional APCs are prepared for these assays in the following way. Monocytes are enriched from healthy human donor PBMCs using a bead-based kit (Miltenyi). Enriched cells are plated in GM-CSF and IL-4 to induce immature DCs. After 5 days, immature DCs are incubated at 37° C. with each peptide for 1 hour before addition of a cytokine maturation cocktail (GM-CSF, IL-1β, IL-4, IL-6, TNFα, PGE1β). Cells are incubated at 37° C. to mature DCs.

[0510] After maturation of DCs. PBMCs (either bulk or enriched for T cells) are added to mature dendritic cells with proliferation cytokines. Cultures are monitored for peptide-specific T cells using a combination of functional assays and/or tetramer staining. Parallel immunogenicity assays with the modified and parent peptides allow for comparisons of the relative efficiency with which the peptides expanded peptide-specific T cells.

[0511] Tetramer Staining. MHC tetramers are used to measure peptide-specific T cell expansion in the immunogenicity assays. For the assessment, tetramer is added to 1×10⁵ cells in PBS containing 1% FCS and 0.1% sodium azide (FACS buffer) according to manufacturer's instructions. Cells are incubated in the dark for 20 minutes at room temperature. Antibodies specific for T cell markers, such as CD8, are then added to a final concentration suggested by the manufacturer, and the cells are incubated in the dark at 4° C., for 20 minutes. Cells are washed with cold FACS buffer and resuspended in buffer containing 1% formaldehyde. Cells are acquired on a FACS Calibur (Becton Dickinson) instrument, and are analyzed by use of Cellquest software (Becton Dickinson). For analysis of tetramer positive cells, the lymphocyte gate is taken from the forward and side-scatter plots. Data are reported as the percentage of cells that were CD8⁺/Tetramer⁺.

[0512] Intracellular cytokine staining. In the absence of well-established tetramer staining to identify antigen-specific T cell populations, antigen-specificity can be estimated using assessment of cytokine production using well-established flow cytometry assays. Briefly, T cells are stimulated with the peptide of interest and compared to a control. After stimulation, production of cytokines by CD4⁺ T cells (e.g., IFNγ and TNFα) are assessed by intracellular staining. These cytokines, especially IFNγ, used to identify stimulated cells.

[0513] EISPOT.

[0514] Peptide-specific T cells are functionally enumerated using the ELISPOT assay (BD Biosciences), which measures the release of IFNgamma from T cells on a single cell basis. Target cells (T2 or HLA-A0201 transfected C1Rs) were pulsed with 10 uM peptide for 1 hour at 37° C., and washed three times. 1×10⁵ peptide-pulsed targets are co-cultured in the ELISPOT plate wells with varying concentrations of T cells (5×10² to 2×10³) taken from the immunogenicity culture. Plates are developed according to the manufacturer's protocol, and analyzed on an ELISPOT reader (Cellular Technology Ltd.) with accompanying software. Spots corresponding to the number of IFNgamma-producing T cells are reported as the absolute number of spots per number of T cells plated. T cells expanded on modified peptides are tested not only for their ability to recognize targets pulsed with the modified peptide, but also for their ability to recognize targets pulsed with the parent peptide.

[0515] CD107 Staining.

[0516] CD107a and b are expressed on the cell surface of CD8⁺ T cells following activation with cognate peptide. The lytic granules of T cells have a lipid bilayer that contains lysosomal-associated membrane glycoproteins (“LAMPs”), which include the molecules CD107a and b. When cytotoxic T cells are activated through the T cell receptor, the membranes of these lytic granules mobilize and fuse with the plasma membrane of the T cell. The granule contents are released, and this leads to the death of the target cell. As the granule membrane fuses with the plasma membrane, C107a and b are exposed on the cell surface, and therefore are markers of degranulation. Because degranulation as measured by CD107 a and b staining is reported on a single cell basis, the assay is used to functionally enumerate peptide-specific T cells. To perform the assay, peptide is added to HLA-A0201-transfected cells C1R to a final concentration of 20 μM, the cells were incubated for 1 hour at 37° C., and washed three times. 1×10⁵ of the peptide-pulsed CIR cells were aliquoted into tubes, and antibodies specific for CD107 a and b are added to a final concentration suggested by the manufacturer (Becton Dickinson). Antibodies are added prior to the addition of T cells in order to “capture” the CD107 molecules as they transiently appear on the surface during the course of the assay, 1×10⁵ T cells from the immunogenicity culture are added next, and the samples were incubated for 4 hours at 37° C. The T cells are further stained for additional cell surface molecules such as CD8 and acquired on a FACS Calibur instrument (Becton Dickinson). Data is analyzed using the accompanying Cellquest software, and results were reported as the percentage of CD8⁺ CD107 a and b⁺ cells.

[0517] Cytotoxicity Assays.

[0518] Cytotoxic activity is measured using a chromium release assay. Target T2 cells are labeled for 1 hour at 37° C. with Na⁵¹Cr and washed 5×10³ target T2 cells were then added to varying numbers of T cells from the immunogenicity culture. Chromium release is measured in supernatant harvested after 4 hours of incubation at 37° C. The percentage of specific lysis is calculated as:

Experimental release-spontaneous release/Total release-spontaneous release×100.

### Example 3. Selection of Tissue-Specific Antigens for a Tumor-Specific Vaccine

[0519] This example illustrates the procedure for the selection of peptide epitopes for vaccine compositions of the invention. The peptides in the composition can be in the form of a nucleic acid sequence, either single or one or more sequences (i.e., minigene) that encodes peptide(s), or may be single and/or polyepitopic peptides.

[0520] Epitopes are selected which, upon administration, mimic immune responses that have been observed to be correlated with tumor clearance. For example, vaccine can include 1-2 epitopes that come from at least one tissue-specific antigen region. Epitopes from one region can be used in combination with epitopes from one or more additional tissue-specific antigen regions.

[0521] Epitopes can be selected, for example, that have a binding affinity of an IC₅₀ of 500 nM or less for an HLA class I molecule, or for class II, an IC₅₀ of 1000 nM or less.

[0522] When creating a polyepitopic compositions, e.g. a minigene, it is typically desirable to generate the smallest peptide possible that encompasses the epitopes of interest. The principles employed are similar, if not the same, as those employed when selecting a peptide comprising nested epitopes. Additionally, however, upon determination of the nucleic acid sequence to be provided as a minigene, the peptide sequence encoded thereby is analyzed to determine whether any “junctional epitopes” have been created. A junctional epitope is a potential HLA binding epitope, e.g., as predicted by motif analysis. Junctional epitopes are generally to be avoided because the recipient may bind to an HLA molecule and generate an immune response to that epitope, which is not present in a native protein sequence.

[0523] Peptide epitopes for inclusion in vaccine compositions are, for example, selected from those listed in the Tables. A vaccine composition comprised of selected peptides, when administered, is safe, efficacious, and elicits an immune response similar in magnitude of an immune response that inhibits tumor growth.

### Example 4. Composition for Prophylactic or Therapeutic Uses

[0524] Immunogenic or vaccine compositions of the present disclosure are used to inhibit tumor growth. For example, a polyepitopic composition (or a nucleic acid comprising the same) containing multiple tissue-specific epitopes is administered to individuals having tumors. The dose of peptide for the immunization is from about 1 to about 50,000 μg, generally 100-5,000 μg, for a 70 kg patient. The initial administration may be followed by booster dosages at 4 weeks followed by evaluation of the magnitude of the immune response in the patient, by techniques that determine the presence of epitope-specific CTL populations in a PBMC sample. Additional booster doses are administered as required. The composition is found to be both safe and efficacious to inhibit tumor growth.

[0525] Alternatively, the polyepitopic composition can be administered as a nucleic acid, for example as RNA, in accordance with methodologies known in the art and disclosed herein.

[0526] Tissue-specific antigen binding agents, such as TCR or CARs can be administered in accordance with methodologies known in the art and disclosed herein. The binding agents can be administered as polynucleotides, for example DNA or RNA, encoding the binding agents as part of cellular therapy. Alternatively, the binding agents can be prepared as antibodies or fragments thereof capable of recognizing the specific peptide: MHC complex coupled to cytotoxic agents or T cell binding agents capable of re-directing patient T cells to tumor cells expressing the epitopes listed in the Tables.

[0527] Tissue-specific antigen peptides, polynucleotides, binding agents, or cells expressing these molecules can be delivered to the same patient via multiple methodologies known in the art, and can further be combined with other cancer therapies (e.g., chemotherapy, surgery, radiation, checkpoint inhibitors, etc.).

### Example 5. Identification of Tissue-Specific Antigen

[0528] This example illustrates an exemplary process for identification of tissue-specific antigen.

[0529] Step 1.

[0530] RNA-Seq-based data were acquired from GTEx and TCGA. Expression was merged (by summation) to the gene symbol level (considering protein-coding genes only), and each sample was scaled such that its values summed to 1,000,000. These values represent transcripts per million (TPM).

[0531] Step 2.

[0532] Genes were identified as being expressed highly in cancer and weakly expressed or absent in essential tissues. Implicitly, genes highly expressed in cancer and non-essential tissues (but not in essential tissues) were still considered as valid targets). The tissues listed in Table 3A were deemed as ESSENTIAL. The tissues in Table 3B were used to represent tumors.

TABLE 3A
From GTEx:

| | |
|---|---|
| Adipose - Subcutaneous | Colon - Transverse |
| Adipose - Visceral (Omentum) | Esophagus - Gastroesophageal Junction |
| Artery - Aorta | Esophagus - Mucosa |
| Artery - Coronary | Esophagus - Muscularis |
| Artery - Tibial | Heart - Atrial Appendage |
| Bladder | Heart - Left Ventricle |
| Brain - Amygdala | Kidney - Cortex |
| Brain - Anterior cingulate corte | Liver |
| Brain - Caudate (basal ganglia) | Lung |
| Brain - Cerebellar Hemisphere | Minor Salivary Gland |
| Brain - Cerebellum | Muscle - Skeletal |
| Brain - Cortex | Nerve - Tibial |
| Brain - Frontal Cortex (BA9) | Pituitary |
| Brain - Hippocampus | Skin - Not Sun Exposed (Suprapubic) |
| Brain - Hypothalamus | Skin - Sun Exposed (Lower leg) |
| Brain - Nucleus accumbens | Small Intestine - Terminal Ileum |
| Brain - Putamen (basal ganglia) | Spleen |
| Brain - Spinal cord (cervical c-1) | Stomach |
| Brain - Substantia nigra | Uterus |
| EBV-transformed lymphocytes | Vagina |
| Cells - Transformed fibroblasts | Whole Blood |
| Colon - Sigmoid | |

From TCGA (non-tumor normal samples):

| | |
|---|---|
| Bladder | Liver |
| Brain | Skin |
| Colon | Stomach |
| Throat (“head and neck”) | Non-smoker Lung |
| Kidney | |

TABLE 3B
From GTEx (normal tissues used as surrogates for tumor tissues):

| | |
|---|---|
| Adrenal Gland | Testis |
| Pancreas | |

From TCGA (tumor tissues):

| | |
|---|---|
| Bladder cancer | Liver cancer |
| Breast cancer | Lung adenocarcinoma |
| Cervical cancer | Lung squamous cell carcinoma |
| Colorectal cancer | Melanoma |
| Glioblastoma | Ovarian cancer |
| Glioma | Prostate cancer |
| Head&neck cancer | Stomach cancer |
| Kidney clear cell cancer | Thyroid cancer |
| Kidney papillary cancer | Uterine cancer |

[0533] The following calculations were carried out to select candidate genes:
[0534] i. For each combination of essential tissue (tissues listed in Table 2A above) and gene, the 95th percentile value expression value was calculated across available samples (using quantile function in R, default parameters, as described in R Core Team (2015). R: A language and environment for statistical computing. R Foundation for Statistical Computing, Vienna, Austria). This was then summarized to a single value per gene using a max operation across different tissues, which was referred to as the “essential expression” of each gene. The initial set of candidate genes comprised all genes with essential expression less than 20 TPM.
[0535] ii. For each combination of tumor tissue (tissues listed in Table 2B above) and candidate gene, the 75th percentile expression value was calculated across available samples (also using quantile function in R). If this values was at least 10 times greater than the gene's essential expression, then the gene was considered as a candidate for the given tumor type.

[0536] Step 3.

[0537] For each gene with suitably restricted expression, all the protein coding sequences of all distinct transcript isoforms (per the Gencode V19 annotation) were digested (in silico) into all possible peptides of lengths 8, 9, 10, 11, and 12. If a peptide was also found in the protein sequence of a gene with an essential score greater than 20 (as might happen in the case of gene paralogs pairs for which one gene has restricted expression and the other does not) then the peptide was excluded as a candidate. The remaining candidate peptides were scored for binding potential using NetMHCpan-v3.0 and RECON for the following HLA I alleles:

TABLE 4

| HLA-A | HLA-B | HLA-C |
|---|---|---|
| HLA-A02:01 | HLA-B07:02 | HLA-C07:01 |
| HLA-A01:01 | HLA-B08:01 | HLA-C07:02 |
| HLA-A03:01 | HLA-B13:02 | HLA-C04:01 |
| HLA-A24:02 | HLA-B46:01 | HLA-C01:02 |
| HLA-A11:01 | — | HLA-C07:02 |
| HLA-A24:02 | — | HLA-C03:04 |
| HLA-A02:01 | — | — |
| HLA-A33:03 | — | — |
| HLA-A30:01 | — | — |

[0538] Step 4.

[0539] For each combination of gene and allele, a peptide was considered to be a positive hit if its predicted binding (per NetMHCpan3.0 or RECON) placed it in the N top-scoring peptides. N was calculated as max(3,0.001*P), where P is the number of peptides evaluated for the given gene-allele combination.

### Example 6. T Cell Manufacturing Protocol 1

[0540] This example provides an example of T cell manufacturing protocol.

[0541] Materials:
[0542] DC media (Cellgenix)
[0543] CD14 microbeads, human, Miltenyi #130-050-201
[0544] Cytokines and/or growth factors
[0545] T cell media (AIM V+RPMI 1640 glutamax⁺ serum+PenStrep)
[0546] Peptide stocks—1 mM per peptide (HIV A02—5-10 peptides, HIV B07—5-10 peptides,
[0547] DOM—4-8 peptides, PIN—6-12 peptides)

[0548] Step 1: Monocyte Isolation for DC Prep
[0549] 1. Calculate the approximate number of PBMCs to thaw based on expected DC yield for each donor.
[0550] 2. Thaw PBMCs and resuspend at ˜1×10⁶-1×10⁸ cells/mL in DC media.
[0551] 3. Add benzonase (1:1000 dilution) and place in incubator with cap loosened.
[0552] 4. Perform CD14⁺ monocyte enrichment according to manufacturer protocol.
[0553] 5. Plate enriched cells in 6-well plates at 1×10⁵-1×10⁷ per well in DC media with one or more cytokines and/or growth factors selected from GM-CSF, IL-4, FLT3L, TNF-α, IL-1β, PGE1, IL-6, TL-7, IFN-α, R848, LPS, ss-rna40, and polyI:C.

[0554] Step 2: Peptide Loading and Maturation
[0555] 1. Count DCs and split the cells according to the experimental conditions in 15 mL tubes, 0.01-1 million cells per condition.
[0556] 2. Spin id 1200 rpm for 5 min and resuspend in 50-400 μL DC medium. Add peptide(s) and place in incubator with loosened cap for 0.5-3 hrs. Volumes were calculated for peptide pools at a concentration of 1 mM per peptide. A volume of each separate pool of A02 (5 peptides) and B07 (5 peptides) was added per well for a final concentration of 0.001-100 μM per peptide.
[0557] 3. After 0.5-3 hrs add 200 μL to 1.5 mL of DC media containing maturation mix and transfer the cells to 24 well plate.
   [0558] The maturation mix contains one or more cytokines selected from GM-CSF, IL-4, FLT3L, TNF-α, IL-1β, PGE1, IL-6, IL-7, IFN-α, R848, LPS, ss-ma40, and polyI:C.

[0559] Step 3: Setting Up Long Term Stimulation (LTS) Experiment
[0560] 1. Carefully remove all media from the wells of the DC plates, transferring each well to a separate well in a 24-well deepwell block.
[0561] 2. Wash each well with 0.5-3 mL T cell media and combine with DC media in the deepwell block.
[0562] 3. Add 100 μL to 2 mL T cell media to each well.
[0563] 4. Spin down DCs at 1200 rpm for 5 min.
[0564] 5. Remove all supernatant, resuspend DCs in 100 μL to 2 mL T cell media and transfer back into the correct wells.
[0565] 6. Thaw PBMCs in T cell media and resuspend at 0.5×10⁶-4×10⁶ cells/mL in T cell media with IL-7 and IL-15.
[0566] 7. Add 0.5-3 mL of prepared PBMCs to each well.

[0567] Step 4: Feeding LTS
[0568] Check with glucose meter if the media is yellow. If glucose remains high, feed culture with IL-7 and IL-15 to the well. If glucose is low, expand the cells to 6 well plate (4 mL/well) and supplement with IL-15 and IL-7. If glucose is very low, expand to 6 mL/well in a 6-well plate.

[0569] Step 5: Feeding LTS
[0570] Feed cultures every 1-4 days, adding fresh IL-15/IL-7 and expanding the culture volume as needed when glucose concentration becomes low.

[0571] Step 6: Re-Stimulation
[0572] Count T cells and repeat from step 3 on a new batch of peptide-loaded DCs. Freeze leftover cells for analysis.

[0573] Step 7: Feeding LTS
[0574] Feed cultures every −1-5 days.

[0575] Step 8: Re-Stimulation
[0576] Count T cells and repeat from step 3 on a new batch of peptide-loaded DCs. Freeze leftover cells for analysis.

[0577] Step 9: Feeding LTS
[0578] Feed cultures every 1-5 days.

[0579] Step 10
[0580] Count T cells and freeze for analysis.

### Example 7. T Cell Manufacturing Protocol 2

[0581] This protocol can be an alternative to the protocol described in Example 6.

[0582] Materials:
[0583] AIM V media (Invitrogen)
[0584] Media 1 (RPMI 1640 glutamax+serum+PenStrep)
[0585] Media 2 (AIM V+RPMI 1640 glutamax+serum+PenStrep)

[0586] Procedure:
[0587] Step 1: Plate 4 million PBMCs in each well of 24 well plate with one or more cytokines in Media 2. The one or more cytokines are selected from GM-CSF, IL-4, FLT3L, TNF-α, IL-1β, PGE1, IL-6, IL-7, IFN-α, R848, LPS, ss-rna40, and polyI:C.
[0588] Step 2: Peptide loading and maturation in Media 2
[0589] 1. Make stock peptide pool of interest (except for no peptide condition) at 0.001-100 μM for shortmers and 0.001-100 μM for longmers final concentration in respective wells and mix.
[0590] 2. Incubate for 0.5-3 hr.
[0591] 3. Make stock maturation cocktail and add to each well after incubation and mix. The maturation cocktail contains one or more cytokines selected from GM-CSF, IL-4, FLT3L, TNF-α, IL-1β, PGE1, IL-6, IL-7, IFN-α, R848, LPS, ss-rna40, and polyI:C.
[0592] Step 3: Add human serum to each well at a final concentration of 2.5-20% by volume and mix.
[0593] Step 4: Carefully replace 50-90% of the media with fresh Media I supplemented with IL-7 and IL-15 to a final concentration of 0.005-500 ng/mL each.
[0594] Step 5: Carefully replace 50-90% of the media with fresh Media I supplemented with IL-7 and IL-15 to a final concentration of 0.005-500 ng/mL each every 1-5 days.
[0595] In case the wells turn orange to yellow on non-feeding days (glucose readout in case of clear media), change 25-75% of existing media with fresh Media 1 and IL-7/IL-15.
[0596] Step 6: Count and freeze (or proceed to the following steps to carry the T cell simulation to step 8 and/or step 10 of protocol 1).
[0597] During the culturing steps from step 1 to step 6, peptide-loaded DCs can be prepared in parallel according to the procedures in protocol 1 “Step I” and “Step 2”.
[0598] Count T cells and stimulate T cells with a new batch of peptide-loaded DCs. Freeze leftover cells for analysis. The T cell stimulation procedure can be carried out according to the procedures in protocol 1 “Step 3”.
[0599] Step 7: Count T cells and repeat T cell stimulation procedures in protocol 1 “step 3” on a new batch of peptide-loaded DCs. Freeze leftover cells for analysis.
[0600] Step 8: Count T cells and freeze for analysis.

### Example 8. T Cell Manufacturing Protocol 3

[0601] Materials:
[0602] AIM V media (Invitrogen)
[0603] Human FLT3L, preclinical CellGenix #1415-050 Stock 50 ng/μL
[0604] TNF-α, preclinical CellGenix #1406-050 Stock 10 ng/μL
[0605] IL-1β, preclinical CellGenix #1411-050 Stock 10 ng/μL
[0606] PGE1 or Alprostadil—Cayman from Czech republic Stock 0.5 μg/μL
[0607] R10 media-RPMI 1640 glutamax+10% Human serum+1% PenStrep
[0608] 20/80 Media-18% AIM V+72% RPMI 1640 glutamax+10% Human Serum+1% PenStrep
[0609] IL7 Stock 5 ng/μL
[0610] IL15 Stock 5 ng/μL

[0611] Procedure:

[0612] Step 1: Plate 5 million PBMCs (or cells of interest) in each well of 24 well plate with FLT3L in 2 mL AIM V media

[0613] Step 2: Peptide loading and maturation-in AIMV
[0614] 1. Mix peptide pool of interest (except for no peptide condition) with PBMCs (or cells of interest) in respective wells.
[0615] 2. Incubate for 1 hr.
[0616] 3. Mix Maturation cocktail (including TNF-α, IL-1β, PGE1, and IL-7) to each well after incubation.
[0617] Step 3: Add human serum to each well at a final concentration of 10% by volume and mix.
[0618] Step 4: Replace the media with fresh RPMI+10% HS media supplemented with 1L7+IL15.
[0619] Step 5: Replace the media with fresh 20/80 media supplemented with IL7+IL 15 during the period of incubation every 1-6 days.
[0620] Step 6: Plate 5 million PBMCs (or cells of interest) in each well of new 6-well plate with FLT3L in 2 mL AIM V media
[0621] Step 7: Peptide loading and maturation for re-stimulation-(new plates)
[0622] 1. Mix peptide pool of interest (except for no peptide condition) with PBMCs (or cells of interest) in respective wells 2. Incubate for 1 hr.
[0623] 3. Mix Maturation cocktail to each well after incubation
[0624] Step 8: Re-stimulation:
[0625] 1. Count first stimulation FLT3L cultures and add 5 million cultured cells to the new Re-stimulation plates.
[0626] 2. Bring the culture volume to 5 mL (AIM V) and add 500 ul of Human serum (10% by volume)
[0627] Step 9: Remove 3 mL of the media and add 6 mL of RPMI+10% HS media supplemented with 1L7+IL15.
[0628] Step 10: Replace 75% of the media with fresh 20/80 media supplemented with IL7+IL 15.
[0629] Step 11: Repeat re-stimulation if needed.

### Example 9. T Cell Induction Protocol

[0630] T Cell Induction #1

| | |
|---|---|
| Step 7 | Autologous Cells |
| | Apheresis Bag #2 |
| Step 8 | CD25⁺ depletion (+/−CD14⁺ depletion) |
| Step 8a | Add FLT3L |
| Step 9 | Addition Patient Specific Peptides and incubation |
| Step 10 | Incubation of depleted PMBCs with FLT3L and peptides |

### T Cell Induction #2

| | |
|---|---|
| Step 11 | T Cell Washing and Resuspension in T cell Media |
| Step 12 | Incubation of T cells with Matured DC (from DC Derivation) |

### T Cell Induction #3

| | |
|---|---|
| Step 11 | T Cell Washing and Resuspension in T cell Media |
| Step 12 | Incubation of T cells with Matured DC (from DC Derivation) |

### Harvest & Cryopreservation

| | | | |
|---|---|---|---|
| Step 15 | | T Cell Harvest | Release Testing: |
| | | | Mycoplasma |
| Step 1 | Drug | Wash and Suspension | Release Testing: Sterility, |
| | Substance | in Final Formulation | Endotoxin, Cell Phenotype, |
| | (DS) | | TNC Count, Viability, Cell |
| | | | Concentration, Potency |
| Step 17 | Drug | DS Fill and | |
| | Product | Cryopreservation | |
| | (DP) | Store in vapor phase | |
| | | of liquid nitrogen | |

### Example 10. T Cell Manufacturing

[0634] Provided herein is a T cell therapy where T cells primed and responsive against antigenic peptides specific for a tissue-specific epitope is administered to the subject. Provided herein are methods for generating tissue-specific epitope responsive T cells for the therapy. The method can comprise generating tissue-specific epitope responsive T cells ex vivo by priming T cells with APCs expressing tissue-specific T cell epitopes and expanding the activated T cells to obtain tissue-specific epitope responsive CD8+ and CD4+ including a population of these cells exhibiting memory phenotype (see, e.g., WO2019094642, incorporated by reference in its entirety). Target tissue-specific antigen responsive T cells are generated ex vivo and immunogenicity is validated using an in vitro antigen-specific T cell assay. Mass spectrometry can be used to validate that cells that express the antigen of interest can process and present the peptides on the relevant HLA molecules. Additionally, the ability of these T cells to kill cells presenting the peptide is confirmed using a cytotoxicity assay.

### Generation of Target Tumor Cell Antigen Responsive T Cells Ex Vivo

[0635] Materials:
[0636] AIM V media (Invitrogen)
[0637] Human FLT3L, preclinical CellGenix #1415-050 Stock 50 ng/μL
[0638] TNF-α, preclinical CellGenix #1406-050 Stock 10 ng/μL
[0639] IL-1β, preclinical CellGenix #1411-050 Stock 10 ng/μL
[0640] PGE1 or Alprostadil—Cayman from Czech republic Stock 0.5 μg/μL
[0641] R10 media-RPMI 1640 glutamax+10% Human serum+1% PenStrep
[0642] 20/80 Media-18% AIM V+72% RPMI 1640 glutamax+10% Human Serum+1% PenStrep
[0643] IL7 Stock 5 ng/μL
[0644] IL 15 Stock 5 ng/μL

### Procedure:

[0645] Step 1: Plate 5 million PBMCs (or cells of interest) in each well of 24 well plate with FLT3L in 2 mL AIM V media
[0646] Step 2: Peptide loading and maturation-in AIMV
[0647] 1. Mix peptide pool of interest (except for no peptide condition) with PBMCs (or cells of interest) in respective wells.
[0648] 2. Incubate for 1 hr.
[0649] 3. Mix Maturation cocktail (including TNF-α, IL-1β, PGE1, and IL-7) to each well after incubation.
[0650] Step 3: Add human serum to each well at a final concentration of 10% by volume and mix.
[0651] Step 4: Replace the media with fresh RPMI+10% HS media supplemented with 1L7+IL15.
[0652] Step 5: Replace the media with fresh 20/80 media supplemented with IL7+IL15 during the period of incubation every 1-6 days.
[0653] Step 6: Plate 5 million PBMCs (or cells of interest) in each well of new 6-well plate with FLT3L in 2 ml AIM V media
[0654] Step 7: Peptide loading and maturation for re-stimulation-(new plates)
[0655] 1. Mix peptide pool of interest (except for no peptide condition) with PBMCs (or cells of interest) in respective wells
[0656] 2. Incubate for 1 hr.
[0657] 3. Mix Maturation cock-tail to each well after incubation
[0658] Step 8: Re-stimulation:
[0659] 1. Count first stimulation FLT3L cultures and add 5 million cultured cells to the new Re-stimulation plates.
[0660] 2. Bring the culture volume to 5 mL (AIM V) and add 500 μL of Human serum (10% by volume) Step 9: Remove 3 mL of the media and add 6 mL of RPMI+10% HS media supplemented with IL7+IL 15.
[0661] Step 10: Replace 75% of the media with fresh 20/80 media supplemented with IL7+IL 15.
[0662] Step 11: Repeat re-stimulation if needed.

### Analysis of Antigen-Specific Induction

[0663] MHC tetramers are purchased or manufactured on-site according to methods known by one of ordinary skill and are used to measure peptide-specific T cell expansion in the immunogenicity assays. For the assessment, tetramer is added to 1×10⁵ cells in PBS containing 1% FCS and 0.1% sodium azide (FACS buffer) according to manufacturer's instructions. Cells are incubated in the dark for 20 minutes at room temperature. Antibodies specific for T cell markers, such as CD8, are then added to a final concentration suggested by the manufacturer, and the cells are incubated in the dark at 4° C. for 20 minutes. Cells are washed with cold FACS buffer and resuspended in buffer containing 1% formaldehyde. Cells are acquired on a LSR Fortessa (Becton Dickinson) instrument and are analyzed by use of FlowJo software (Becton Dickinson). For analysis of tetramer positive cells, the lymphocyte gate is taken from the forward and side-scatter plots. Data are reported as the percentage of cells that were CD8⁺/tetramer⁺.

### Evaluation of Presentation of Tissue-Specify Antigens

[0664] The affinity of the tissue-specific epitope s for HLA alleles and stability of the tissue-specific epitopes with the HLA alleles can be determined as described herein. An exemplary detailed description of the protocol utilized to measure the binding affinity of peptides to Class I MHC has been published (Sette et al, Mol. Immunol. 31(11):813-22, 1994). In brief, MHCI complexes were prepared and bound to radiolabeled reference peptides. Peptides were incubated at varying concentrations with these complexes for 2 days, and the amount of remaining radiolabeled peptide bound to MHCI was measured using size exclusion gel-filtration. The lower the concentration of test peptide needed to displace the reference radiolabeled peptide demonstrates a stronger affinity of the test peptide for MHCI. Peptides with affinities to MHCI<50 nM are generally considered strong binders while those with affinities <150 nM are considered intermediate binders and those <500 nM are considered weak binders (Fritsch et al, 2014).

[0665] An exemplary detailed description of the protocol utilized to measure the binding stability of peptides to Class I MHC has been published (Harndahl et al. J Immunol Methods. 374:5-12, 2011). Briefly, synthetic genes encoding biotinylated MHC-1 heavy and light chains are expressed in E. coli and purified from inclusion bodies using standard methods. The light chain (β2m) is radio-labeled with iodine (1251), and combined with the purified MHC-1 heavy chain and peptide of interest at 18° C. to initiate pMHC-I complex formation. These reactions are carried out in streptavidin coated microplates to bind the biotinylated MHC-I heavy chains to the surface and allow measurement of radiolabeled light chain to monitor complex formation. Dissociation is initiated by addition of higher concentrations of unlabeled light-chain and incubation at 37° C. Stability is defined as the length of time in hours it takes for half of the complexes to dissociate, as measured by scintillation counts.

[0666] To assess whether antigens could be processed and presented from the larger polypeptide context, peptides eluted from HLA molecules isolated from cells expressing the genes of interest were analyzed by tandem mass spectrometry (MS/MS).

[0667] For analysis of presentation of tissue-specific antigens, cell lines are utilized that were lentivirally transduced to express the tissue-specific antigens. HLA molecules are either isolated based on the natural expression of the cell lines or the cell lines are lentivirally transduced or transiently transfected to express the HLA of interest. 293T cells are transduced with a lentiviral vector encoding various regions of a tissue-specific polypeptides. Greater than 50 million cells expressing peptides encoded by a tissue-specific polypeptide are cultured and peptides were eluted from HLA-peptide complexes using an acid wash. Eluted peptides are then analyzed by targeted MS/MS with parallel reaction monitoring (PRM).

### HLA Class I Binding and Stability

[0668] A subset of the peptides used for affinity measurements are also used for stability measurements using the assay described. Less than 50 nM can be considered by the field as a strong binder, 50-150 nM can be considered an intermediate binder, 150-500 nM can be considered a weak binder, and greater than 500 nM can be considered a very weak binder.

[0669] Immunogenicity assays are used to test the ability of each test peptide to expand T cells. Mature professional APCs are prepared for these assays in the following way. Monocytes are enriched from healthy human donor PBMCs using a bead-based kit (Miltenyi). Enriched cells are plated in GM-CSF and IL-4 to induce immature DCs. After 5 days, immature DCs are incubated at 37° C. with each peptide for 1 hour before addition of a cytokine maturation cocktail (GM-CSF, IL-1β, IL-4, IL-6, TNFα, PGE1β). Cells are incubated at 37° C. to mature DCs.

### Assessment of Cytotoxic Capacity of Antigen-Specific T Cells In Vitro

[0670] Cytotoxicity activity can be measured with the detection of cleaved Caspase 3 in target cells by Flow cytometry. Target cancer cells are engineered to express the tissue-specific peptide along and the proper MHC-I allele. Mock-transduced target cells (i.e. not expressing the tissue-specific peptide) are used as a negative control. The cells are labeled with CFSE to distinguish them from the stimulated PBMCs used as effector cells. The target and effector cells are co-cultured for 6 hours before being harvested. Intracellular staining is performed to detect the cleaved form of Caspase 3 in the CFSE-positive target cells. The percentage of specific lysis is calculated as: Experimental cleavage of Caspase 3/spontaneous cleavage of Caspase 3 (measured in the absence of the specific peptide expression)×100.

[0671] In some examples, cytotoxicity activity is assessed by co-culturing induced T cells with a population of tissue-specific antigen-specific T cells with target cells expressing the corresponding HLA, and by determining the relative growth of the target cells, along with measuring the apoptotic marker Annexin V in the target cells specifically. Target cells are engineered to express the tissue-specific peptide or the tissue-specific peptide is exogenously loaded. Mock-transduced target cells (i.e. not expressing the tissue-specific peptide), target cells loaded with tissue-specific peptides, or target cells with no peptide loaded are used as a negative control. The cells are also transduced to stably express GFP allowing the tracking of target cell growth. The GFP signal or Annexin-V signal arc measured over time with an IncuCyte S3 apparatus. Annexin V signal originating from effector cells is filtered out by size exclusion. Target cell growth and death is expressed as GFP and Annexin-V area (mm²) over time, respectively.

### Enrichment of Target Antigen Activated T Cells

[0672] Tissue-specific antigen responsive T cells may be further enriched. In this example, multiple avenues for enrichment of antigen responsive T cells are explored. After the initial stimulation of tissue-specific antigen-specific T cells, an enrichment procedure can be used prior to further expansion of these cells. As an example, stimulated cultures and pulsed with the same tissue-specific peptides used for the initial stimulation on day 13, and cells upregulating 4-1BB are enriched using Magnetic-Assisted Cell Separation (MACS; Miltenyi). These cells can then be further expanded, for example, using anti-CD3 and anti-CD28 microbeads and low-dose IL-2.

### Immunogenicity Assays for Selected Peptides

[0673] After maturation of DCs, PBMCs (either bulk or enriched for T cells) are added to mature dendritic cells with proliferation cytokines. Cultures are monitored for tissue-specific peptide-specific T cells using a combination of functional assays and/or tetramer staining. Parallel immunogenicity assays with the tissue-specific peptides allowed for comparisons of the relative efficiency with which the peptides expanded peptide-specific T cells. In some embodiments, the peptides elicit an immune response in the T cell culture comprises detecting an expression of a FAS ligand, granzyme, perforins, IFN, TNF, or a combination thereof in the T cell culture.

[0674] Immunogenicity can be measured by a tetramer assay. MHC tetramers are purchased or manufactured on-site, and are used to measure peptide-specific T cell expansion in the immunogenicity assays. For the assessment, tetramer is added to 1×10\hat{ }5 cells in PBS containing 1% FCS and 0.1% sodium azide (FACS buffer) according to manufacturer's instructions. Cells are incubated in the dark for 20 minutes at room temperature. Antibodies specific for T cell markers, such as CD8, are then added to a final concentration suggested by the manufacturer, and the cells are incubated in the dark at 4 degrees Celsius for 20 minutes. Cells are washed with cold FACS buffer and resuspended in buffer containing 1% formaldehyde. Cells are acquired on a FACS Calibur (Becton Dickinson) instrument, and are analyzed by use of Cellquest software (Becton Dickinson). For analysis of tetramer positive cells, the lymphocyte gate is taken from the forward and side-scatter plots. Data are reported as the percentage of cells that were CD8⁺/Tetramer⁺.

[0675] Immunogenicity can be measured by intracellular cytokine staining. In the absence of well-established tetramer staining to identify tissue-specific antigen-specific T cell populations, antigen-specificity can be estimated using assessment of cytokine production using well-established flow cytometry assays. Briefly, T cells are stimulated with the tissue-specific peptide of interest and compared to a control. After stimulation, production of cytokines by CD4+ T cells (e.g., IFNγ and TNFα) are assessed by intracellular staining. These cytokines, especially IFNγ, used to identify stimulated cells.

[0676] In some embodiments the immunogenicity is measured by measuring a protein or peptide expressed by the T cell, using ELISpot assay. Peptide-responsive T cells are functionally enumerated using the ELISpot assay (BD Biosciences), which measures the release of IFNγ from T cells on a single cell basis. Target cells are pulsed with 10 μM tissue-specific peptide for one hour at 37 degrees C., and washed three times, 1×10\hat{ }5 peptide-pulsed targets are co-cultured in the ELISPOT plate wells with varying concentrations of T cells (5×10\hat{ }2 to 2×10\hat{ }3) taken from the immunogenicity culture. Plates are developed according to the manufacturer's protocol, and analyzed on an ELISPOT reader (Cellular Technology Ltd.) with accompanying software. Spots corresponding to the number of IFN gamma-producing T cells are reported as the absolute number of spots per number of T cells plated. T cells expanded on modified peptides are tested not only for their ability to recognize targets pulsed with the modified peptide, but also for their ability to recognize targets pulsed with the parent peptide.

[0677] CD107a and CD107b are expressed on the cell surface of CD8+ T cells following activation with tissue-specific peptide. The lytic granules of T cells have a lipid bilayer that contains lysosomal-associated membrane glycoproteins (“LAMPs”), which include the molecules CD107a and b. When cytotoxic T cells are activated through the T cell receptor, the membranes of these lytic granules mobilize and fuse with the plasma membrane of the T cell. The granule contents are released, and this leads to the death of the target cell. As the granule membrane fuses with the plasma membrane, C107a and b are exposed on the cell surface, and therefore are markers of degranulation. Because degranulation as measured by CD107a and b staining is reported on a single cell basis, the assay is used to functionally enumerate tissue-specific peptide-specific T cells. To perform the assay, peptide is added to HLA-transfected cells to a final concentration of 20 μM, the cells are incubated for 1 hour at 37 degrees C., and washed three times, 1×10\hat{ }5 of the peptide-pulsed cells were aliquoted into tubes, and antibodies specific for CD107a and b are added to a final concentration suggested by the manufacturer (Becton Dickinson). Antibodies are added prior to the addition of T cells in order to “capture” the CD107 molecules as they transiently appear on the surface during the course of the assay, 1×10\hat{ }5 T cells from the immunogenicity culture are added next, and the samples were incubated for 4 hours at 37 degrees C. The T cells are further stained for additional cell surface molecules such as CD8 and acquired on a FACS Calibur instrument (Becton Dickinson). Data is analyzed using the accompanying Cellquest software, and results are reported as the percentage of CD8+ CD107 a and b+ cells.

[0678] Cytotoxic activity is measured using a chromium release assay. Target T2 cells are labeled for 1 hour at 37 degrees C., with Na⁵¹Cr and washed 5×10\hat{ }3 target cells are then added to varying numbers of T cells from the immunogenicity culture. Chromium release is measured in supernatant harvested after 4 hours of incubation at 37 degrees C. The percentage of specific lysis is calculated as:

Experimental release-spontaneous release/Total release-spontaneous release×100

[0679] Immunogenicity assays are carried out to assess whether each peptide can elicit a T cell response by tissue-specific antigen-specific expansion. A positive result demonstrates that a peptide can induce a T cell response. Several tissue-specific peptides are tested for their capacity to elicit CD8+ T cell responses with multimer readouts as described. Each positive result was measured with a second multimer preparation to avoid any preparation biases. In an exemplary assay, T cells were co-cultured with monocyte-derived dendritic cells loaded with tissue-specific epitope for 10 days. CD8+ T cells were analyzed for tissue-specific antigen-specificity for tissue-specific epitope using multimers (initial: BV421 and PE: validation: APC and BUV396).

[0680] While antigen-specific CD8+ T cell responses are readily assessed using well-established HLA Class 1 multimer technology, CD4+ T cell responses require a separate assay to evaluate because HLA Class II multimer technology is not well-established. In order to assess CD4+ T cell responses, T cells are re-stimulated with the tissue-specific peptide of interest. After stimulation, production of cytokines by CD4+ T cells (e.g., IFNγ and TNFα) are assessed by intracellular staining. These cytokines, especially IFNγ, used to identify stimulated cells.

### Cell Expansion and Preparation

[0681] To prepare APCs, the following method is employed (a) obtain of autologous immune cells from the peripheral blood of the patient; enrich monocytes and dendritic cells in culture; load tissue-specific peptides and mature DCs.

### T Cell Induction (Protocol 1)

[0682] First induction: (a) Obtaining autologous T cells from an apheresis bag; (b) Depleting CD25+ cells and CD14+ cells, alternatively, depleting only CD25+ cells; (c) Washing the peptide loaded and mature DC cells, resuspending in the T cell culture media; (d) Incubating T cells with the matured DC.

[0683] Second induction: (a) Washing T cells, and resuspending in T cell media, and optionally evaluating a small aliquot from the cell culture to determine the cell growth, comparative growth and induction of T cell subtypes and antigen specificity and monitoring loss of cell population; (b) Incubating T cells with mature DC.

[0684] Third induction: (a) Washing T cells, and resuspending in T cell media, and optionally evaluating a small aliquot from the cell culture to determine the cell growth, comparative growth and induction of T cell subtypes and tissue-specific antigen specificity and monitoring loss of cell population; (b) Incubating T cells with mature DC.

[0685] To harvest peptide activated t cells and cryopreserve the T cells, the following method can be employed (a) Washing and resuspension of the final formulation comprising the activated T cells which are at an optimum cell number and proportion of cell types that constitutes the desired characteristics of the Drug Substance (DS). The release criteria testing include inter alia, Sterility, Endotoxin, Cell Phenotype, TNC Count, Viability, Cell Concentration, Potency; (b) Filling drug substance in suitable enclosed infusion bags; (c) Preservation until time of use.

### Methods of Functional Characterization of the CD4+ and CD8+Tissue-Specific Antigen-Specific T Cells.

[0686] T cell manufacturing processes were developed to raise memory and de novo CD4+ and CD8+ T cell responses to tissue-specific antigens through multiple rounds of ex-vivo T cell stimulation, generating a tissue-specific antigen-reactive T cell product for use in adoptive cell therapy. Detailed characterization of the stimulated T cell product can be used to test the many potential variables these processes utilize.

[0687] To probe T cell functionality and/or specificity, an assay was developed to simultaneously detect tissue-specific antigen-specific T cell responses and characterize their magnitude and function. This assay employs the following steps. First T cell-APC co-cultures were used to elicit reactivity in tissue-specific antigen-specific T cells. Optionally, sample multiplexing using fluorescent cell barcoding is employed. To identify tissue-specific antigen-specific CD8+ T cells and to examine T cell functionality, staining of peptide-MHC multimers and multiparameter intracellular and/or cell surface cell marker staining were probed simultaneously using FACS analysis. The results of this streamlined assay demonstrated its application to study T cell responses induced from a healthy donor. Tissue-specific antigen-specific T cell responses induced toward peptides are identified in a donor. The magnitude, specificity and functionality of the induced T cell responses are also compared. Briefly, different T cell samples are barcoded with different fluorescent dyes at different concentrations (see, e.g.. Example 19). Each sample receives a different concentration of fluorescent dye or combination of multiple dyes at different concentrations. Samples are resuspended in phosphate-buffered saline (PBS) and then fluorophores dissolved in DMSO (typically at 1:50 dilution) are added to a maximum final concentration of 5 μM. After labeling for 5 min at 37° C., excess fluorescent dye is quenched by the addition of protein-containing medium (e.g. RPMI medium containing 10% pooled human type AB serum). Uniquely barcoded T cell cultures are challenged with autologous APC pulsed with the tissue-specific antigen peptides as described above.

[0688] The differentially labeled samples are combined into one FACS tube or well, and pelleted again if the resulting volume is greater than 100 μL. The combined, barcoded sample (typically 100 μL) is stained with surface marker antibodies including fluorochrome conjugated peptide-MHC multimers. After fixation and permeabilization, the sample is additionally stained intracellularly with antibodies targeting TNF-α and IFN-γ.

[0689] The cell marker profile and MHC tetramer staining of the combined, barcoded T cell sample are then analyzed simultaneously by flow cytometry on flow cytometer. Unlike other methods that analyze cell marker profiles and MHC tetramer staining of a T cell sample separately, the simultaneous analysis of the cell marker profile and MHC tetramer staining of a T cell sample described in this example provides information about the percentage of T cells that are both tissue-specific antigen specific and that have increased cell marker staining. Other methods that analyze cell marker profiles and MHC tetramer staining of a T cell sample, separately determine the percentage of T cells of a sample that are tissue-specific antigen specific, and separately determine the percentage of T cells that have increased cell marker staining, only allowing correlation of these frequencies.

[0690] The simultaneous analysis of the cell marker profile and MHC tetramer staining of a T cell sample described in this example does not rely on correlation of the frequency of tissue-specific antigen specific T cells and the frequency of T cells that have increased cell marker staining: rather, it provides a frequency of T cells that are both tissue-specific antigen specific and that have increased cell marker staining. The simultaneous analysis of the cell marker profile and MHC tetramer staining of a T cell sample described in this example allows for determination on a single cell level, those cells that are both tissue-specific antigen specific and that have increased cell marker staining.

[0691] To evaluate the success of a given induction process, a recall response assay may be used followed by a multiplexed, multiparameter flow cytometry panel analysis. A sample taken from an induction culture is labeled with a unique two-color fluorescent cell barcode. The labeled cells are incubated on tissue-specific antigen-loaded DCs or unloaded DCs overnight to stimulate a functional response in the tissue-specific antigen-specific cells. The next day, uniquely labeled cells are combined prior to antibody and multimer staining.

### Exemplary Materials for T Cell Culture are Provided Below:

[0692] Materials: AIM V media (Invitrogen)Human FLT3L; preclinical CellGenix #1415-050 Stock 50 ng/μL TNFα; preclinical CellGenix #1406-050 Stock 10 ng/μL; IL-1β, preclinical CellGenix #1411-050 Stock 10 ng/μL; PGE1 or Alprostadil—Cayman from Czech republic Stock 0.5 μg/μL; R10 media-RPMI 1640 glutamax+10% Human serum+1% PenStrep: 20/80 Media-18% AIM V+72% RPMI 1640 glutamax+10% Human Serum+1% PenStrep; IL7 Stock 5 ng/μL: IL15 Stock 5 ng/μL; DC media (Cellgenix); CD14 microbeads, human, Miltenyi #130-050-201. Cytokines and/or growth factors. T cell media (AIM V+RPMI 1640 glutamax+serum+PenStrep), Peptide stocks—1 mM per peptide tissue-specific peptides).

### Example 11. Discovery Approach

[0693] In this example, a discovery approach for MHC-epitope and cognate TCRs for effective T cell therapeutics is described (FIG. 73).

### MHC-I Peptide Enrichment

[0694] Frozen cell pellets endogenously expressing MHC molecules (untagged) or biotin acceptor peptide (BAP)-tagged MHC molecules were lysed by pipetting and end-over-end rotation for twenty minutes using lysis buffer [20 mM Tris-Cl pH 8, 100 mM NaCl, 6 mM MgCl2, 1.5% (v/v) Triton X-100, 60 mM octyl B-D-glucopyranoside, 0.2 mM of 2-Iodoacetamide, 1 mM EDTA pH 8, 1 mM PMSF, 1× complete EDTA-free protease inhibitor cocktail (Roche)] plus benzonase nuclease for twenty minutes. Tissue samples were homogenized in lysis buffer plus benzonase nuclease. All lysates were cleared by centrifugation. Samples with untagged MHC molecules were subsequently incubated with GammaBind Plus Sepharose Beads (GE Healthcare) pre-charged with a pan-HLA A/B/C antibody (clone W6/32) overnight at 4 C with end-over-end rotation. BAP-tagged samples were biotinylated with 0.56 μM biotin, 1 mM ATP, and 1 μM BirA biotin ligase for 10 minutes, and subsequently incubated with High-Capacity NeutrAvidin Agarose resin for 30 minutes at 4° C. with end-over-end rotation. Following enrichment, beads were washed 2× with wash buffer A [20 mM Tris-Cl pH 8, 100 mM, NaCl, 60 mM octyl B-D-glucopyranoside, 0.2 mM of 2-Iodoacetamide, 1 mM EDTA pH 8] and wash buffer B [10 mM Tris-Cl pH 8] using a positive pressure manifold. MHC molecules were eluted using 10% acetic acid and peptides were isolated using 10K molecular weight cut-off filtration following filter passivation with 1% bovine serum albumin (BSA). If required, samples were next reduced and alkylated using 5 mM Bond-Breaker TCEP solution at 60° C. for 30 min followed by 15 mM 2-Iodoacetamide for 30 min, protected from light. Samples were next acidified using 100% formic acid and desalted using 10 mg Sep-Pak tC18 μElution plates with peptide elutions at 15% acetonitrile and 50% acetonitrile, which were subsequently pooled. The volume of eluted peptides was reduced using vacuum centrifugation.

### Discovery Mass Spectrometry MHC-Peptide Analysis

[0695] For discovery approach and analyses (unbiased identification of presented MHC-peptides), peptides were resuspended in 3% acetonitrile, 5% formic acid and analyzed using liquid chromatography-mass spectrometry with a data dependent acquisition (DDA) methodology.

### Spectral Searching of Internal and Published DDA Datasets for Class I MHC Peptides

[0696] Raw mass spectra files generated in house or published datasets accessed using the PRoteomics IDEntifications (PRIDE) database repository or Mass Spectrometry Interactive Virtual Environment (MassIVE) database repository were searched using Spectrum Mill software package (version BI.07.04.210) against all UCSC Genome Browser genes (January 2018, Homo sapiens) and common contaminants. Searches included oxidated methionine as a variable modification in all searches, and carboxymethylation of cystine residues as a variable modification when sample processing included cystine reduction and alkylation steps. A minimum scored peak intensity (SPI) of 50% & PSM FDR estimate <1% was used to filter results. All sequences between 7 and 17 amino acids in length were considered.

### Targeted Mass Spectrometry MHC-Peptide Analysis

[0697] For targeted analyses, isolated MHC-I peptides were labeled using an isobaric labeling reagent from the tandem mass tag (TMT) 10-plex reagent set (Thermo Fisher). Dried peptides were resuspended in 50 mM HEPES buffer pH 8.5 and combined with 33.3 μg of TMT solubilized in 100% anhydrous acetonitrile. Peptides were incubated for 1 hour at room temperature after which the reaction was quenched with hydroxylamine. Peptides were subsequently dried by vacuum centrifugation, and resuspended in 3% acetonitrile, 5% formic acid. Prior to analysis, heavy isotope-labeled synthetic peptides corresponding to epitope targets of interest were labeled with Super Heavy TMT labeling reagent (Thermo Fisher) as—previously described. Dried, labeled synthetic peptides were resuspended in 3% acetonitrile, 5% formic acid and 100 fmol of each peptide was added to the isolated, TMT-10plex labeled enriched peptide mixture.

[0698] Peptides were analyzed using SureQuant targeted data acquisition strategy, where the heavy isotope labeled synthetic peptide serves as a trigger to guide the acquisition of spectrum corresponding to the light (unlabeled) endogenous MHC peptide using mass offset triggering and pseudo-spectral matching. All analyses were analyzed in Skyline, where the detection of an endogenous peptide was verified by matching retention times and spectral similarity between the heavy synthetic peptide and the light endogenous peptide (FIG. 74). Spectral similarity metrics include the dot product score and manual validation by comparing intensity distributions of 6 pre-selected product ions. Chromatographs of 6 characteristic fragment ions for the light (endogenous) and heavy isotope-labeled synthetic peptide sequence “HPEYNRPLL (SEQ ID NO: 8%9)” derived from KLK4 (HLA*B-07:02, where the endogenous peptide was identified in a human prostate specimen) are shown. Matched chromatography retention times and a high dot product similarity score (0.992, calculated using Skyline software) of peptide fragment ions provide validation that this epitope is processed and presented on the HLA-B*07:02 molecule. Two exemplary spectrums showing spectral validation of endogenous peptides using targeted proteomics are shown in FIG. 75. Spectrum for the light (endogenous) HPEYNRPLL (SEQ ID NO: 4143) epitope identified on a human prostate specimen (left) and the corresponding heavy isotope-labeled synthetic peptide (right) are shown. B and Y fragment ions are shown, and display high spectral similarity, confirming detection of the endogenous epitope. For each peptide, the top 200 more intense ions were plotted, and corresponding mass error of highlighted b and y ions are plotted below spectrum plots.

### NeoStim TCR Identification Protocol

[0699] In vitro T cell inductions were used to prime, enrich, and expand antigen specific T cells. Healthy human donor PMBCs were seeded into multiple wells of a GREX 24 well flask with FLT3-L in AIM-V media (Invitrogen). Inducing peptides, TNF-α, IL-1β, PGE1, and TL-7 were added into wells after 24 hours. After an overnight incubation, human serum was added to the wells to a final concentration of 5%. The culture media was increased to 7 mL 48 hours following the addition of human serum, the added media contained 5% human serum, IL-7, and IL-15. The IL-7 and IL-15 concentration was maintained throughout the culture by supplementing the cultures with the cytokines every 48-72 hours.

[0700] On Day 13 of culture, the inducing peptides are reintroduced to the cultures for 24 hours. The cultures are then harvested and wells with the same inducing peptides were combined to achieve a total cell number >100e6. These pooled samples were then enriched for CD137 using the Miltenyi CD137 GMP MACS kit and LS columns with a 70 um pre-separation filter.

[0701] Enriched cultures were then expanded in AIM-V media containing IL-2, IL-7, IL-15, human serum, anti-CD28 antibody, and in some cases, glucose, non-essential amino acids, and vitamins for 24 hours. In some cases, inducing peptides may have been added in an increasing peptide concentration for the three days following enrichment (days 15, 16, and 17 of the culture). On day 19 of the culture, the culture volume was increased to 6 mL via the addition of AIM-V media containing IL-2, IL-7, IL-15, human serum, glucose, non-essential amino acids, and vitamins.

[0702] The cultures were harvested on Day 26 following the start of the culture. Once harvested the cells were frozen in FBS supplemented with 10% DMSO or analyzed for multimer staining immediately after harvest. The frozen samples were moved to long term liquid nitrogen storage.

[0703] The cells were stained with CD14, CD16, CD19, CD8, and CD4 as linage markers and a suite of multimers loaded with the inducing peptides. Antigen specific cells were identified as CD14− CD16− CD19− CD4− CD8+ positive for the unique peptide fluorophores and negative for the other fluorophores

### Multimer Results

[0704] FIG. 76 depicts exemplary flow cytometry plots of peptide-MHC multimer staining of target epitopes after naive T cell inductions in healthy donors with the indicated HLA-I molecules. Multimer positive populations and the percentage of multimer positive cells is shown. The top panel displays positive sample identifications using a combinatorial multimer analysis. The bottom panel displays results from a confirmation combinatorial analysis performed on frozen samples following the initial identification from the top panel. Multimer positive cells from analyses in the bottom panel are sorted for downstream TCR identification.

### TCR Identification

[0705] FIG. 77 depicts graphs showing exemplary TCR clonotypes identified from the 10× genomics pipeline. Each graph originated from a single sorted, multimer positive, population. The samples in this case all contained two unique TCR clonotypes, identified by a paired alpha and beta sequence. In the case where the 10× genomics pipeline identified a clonotype that contained multiple of either alpha or beta sequences, all possible combinations were synthesized for antigen specificity and avidity.

### Transfection and Lentivirus Production

[0706] Lentivirus encoding antigen-specific TCRs was prepared by the LV-MAX Lentiviral Production System supplied by Gibco using the protocol to produce Lentivirus in a 50 mL conical tube. Following the transient transfection, the lentivirus was tittered using Lenti-X GoStix from Takara and then concentrated 10 fold using Lenti-X Concentrator from Takara.

### CD8 Transduction of Jurkat Cells

[0707] 2e6 CD8 Jurkat cells were plated in a 24 well plate in 1 mL RPMI supplemented with 10% FBS and 200 μL Lentiblast. Concentrated virus was added to the well, at GV ˜40,000 add 100 uL, adding at most 1 mL to each culture. The cells were spinfected at 2400 rpm, 32C, for 45 minutes and incubated overnight. On the following day the plates were spun and either the media was changed to fresh RPMI with no virus, or the spinfection was repeated for a total of 2 times.

[0708] The cells were cultured for a total of 7 days in the 24 well plate before they were expanded to a GREX 24 flask and put under puro selection. Following 48 hours of selection, the cells were used for downstream analyses.

### Jurkat TCR-pMHC Recognition Assay

[0709] The coculture is to be done at an effector to target ratio of 5:1. The target cell number can vary between 50,000 and 10,000 cells with an according number of effector cells to maintain the ratio. For adherent cells, the target cells are plated for between 2 hours and overnight before peptide is added. Peptides are serially diluted to a range between 10 μM and 0.1 nM final concentration and are added at least 1 hour prior to addition of Jurkat cells. Prior to addition to the coculture, Jurkat cells are washed and resuspended in RPMI supplemented with 10% FBS.

[0710] The cells were co-cultured overnight before harvest and staining for CD69 expression via flow using a CD8, CD3, and murine TCR constant antibodies as lineage markers for effector cells.

### TCR Avidity Measurements

[0711] Target A375 cells or T2 cells were transduced to overexpress the allele of interest. A375 cells were plated at a density of 50 k per well and T2 cells were plated at a density of 10K per well, and were peptide pulsed for 1 hour at a final concentration between 10e3 and 10e-1 nM. Cells were co-cultured with Jurkat effector cells transduced to express the TCR of interest overnight at a 5:1 effector:target ratio before harvest. Cells were stained for CD69 expression using flow cytometry with CD8, CD3, and murine TCR constant antibodies as cell linear markers for effector cells. Data is reported as percentage of CD69 positive cells among TCR-expressing Jurkat cells. FIG. 78 depicts exemplary plots showing avidity of exemplary TCRs. The plots reflect the CD69 expression on transduced Jurkat cells (identified by the co-expression of murine TCR. CD8, and CD3) following an overnight coculture with a target cell line presenting the HLA and loaded with a variable amount of peptide. Of the seven TCRs tested, five of them show increased expression of CD69 in a peptide dependent manner. The concentration required to achieve a 50% activation (EC50) is calculated from these plots and the results are shown on the plot.

[0712] The following Table 5 shows exemplary results of TCR discovery using the protocols above.

TABLE 5
TCR discovery results

| | | | | Reactive T cell |
|---|---|---|---|---|
| | SEQ | | | population |
| Epitope | ID NO: | Allele | Gene | gencrated |
| SLSKILDTV | 826 | A02:01 | ANKRD30A | Y |
| LLSHGAVIEV | 831 | A02:01 | ANKRD30A | Y |
| SLQCVSLHL | 3456 | A02:01 | KLK2 | Y |
| VLVHPQWVL | 3757 | A02:01 | KLK2/3/4 | Y |
| SLFHPEDTGQV | 3775 | A02:01 | KLK3 | Y |
| HPEYNRPLL | 4143 | B07:02 | KLK4 | Y |
| KIWEELSVLEV | 8966 | A02:01 | MAGEA3 | Y |
| KVLEHVVRV | 4643 | A02:01 | MAGEA4 | Y |
| GLSNLTHVL | 8967 | A02:01 | PRAME | Y |
| SLLQHLIGL | 6095 | A02:01 | PRAME | Y |
| PYLGQMINL | 6120 | A24:02 | PRAME | Y |
| SPSVSQLSVL | 6139 | B07:02 | PRAME | Y |
| MPMQDIKMIL | 8968 | B07:02 | PRAME | Y |

A T cell population reactive to each of the above epitope:MHC complexes has been generated.

### Endogenous TCR Activity Assay

[0713] MDA-PCa-2b cells were plated at 50K/well in F12K media. The next day the cultures were treated with a cocktail of interferon alpha, beta, and gamma all at 1 U/uL final concentration. The next day the cells were washed with RPMI supplemented with 10% FBS and Glutamax. The cultures were then pulsed with peptide at a final concentration of 2 μM for 1 hour before the addition of effector cells.

[0714] The cells were co-cultured overnight before harvest and staining for CD69 expression via flow using a CD8, CD3, and murine TCR constant antibodies as lineage markers for effector cells and HLA-B07 as a lineage marker for the target cells. FIG. 79 depicts exemplary plots showing endogenous activity of two different exemplary TCRs, avidity of exemplary TCRs, the plots here reflect the activation of two different TCR sequences (hereafter named mTCR21-033 and mTCR-034) following a coculture with the cell line MDA-PCa-2b which is endogenous for both HLA-B07 and KLK4. These plots are showing an increase in activation of mTCR21-033, but not mTCR21-034 following a 24-hour treatment with a cocktail of interferons (IFN). The IFN treatment increases the expression of surface HLA on cell lines, and the increased surface expression of the HLA can provide more expression of HLA-B07 bound to the KLK4 epitope.

[0715] While preferred embodiments of the present invention have been shown and described herein, it will be obvious to those skilled in the art that such embodiments are provided by way of example only. Numerous variations, changes, and substitutions will now occur to those skilled in the art without departing from the invention. It should be understood that various alternatives to the embodiments of the invention described herein may be employed in practicing the invention. It is intended that the following claims define the scope of the invention and that methods and structures within the scope of these claims and their equivalents be covered thereby.

1-94. (canceled)

95. A method of treating a disease or condition in a human subject in need thereof, comprising:
administering a composition to the human subject, wherein the composition comprises:
(a) a tissue-specific antigen peptide comprising an epitope sequence of a protein, wherein the epitope sequence is expressed by a diseased cell of a target tissue of the human subject;
(b) a polynucleotide encoding the tissue-specific antigen peptide;
(c) one or more antigen presenting cells (APCs) presenting the epitope sequence;
(d) a T cell receptor (TCR) specific to a complex of (i) the epitope sequence and (ii) a protein encoded by an HLA allele of the human subject; or
(e) a population of immune cells from a biological sample comprising at least one antigen specific T cell comprising the TCR;
wherein the epitope sequence binds to or is predicted to bind to a protein encoded by an HLA allele expressed by the human subject, and
wherein the tissue-specific antigen epitope gene has an expression level in the diseased cell of a target tissue of the human subject that is at least 2 fold more than an expression level of the tissue-specific antigen epitope gene in cells of each non-target tissue of the subject, wherein the tissue-specific antigen is specific to a non-essential tissue, and
wherein the non-essential tissue is a tissue not required for survival of a human.

96. The method of claim 95, wherein human subject does not have the non-essential tissue or the function of the non-essential tissue is substituted.

97. The method of claim 95, wherein human subject has the non-essential tissue.

98. The method of claim 95, wherein the tissue-specific antigen peptide comprising an epitope sequence of a protein is expressed in the target tissue and not expressed in each tissue of a plurality of non-target tissues that are different than the target tissue.

99. The method of claim 95, wherein the diseased cell is a tumor cell of the target tissue.

100. The method of claim 95, wherein an mRNA expression level of a gene encoding the tissue-specific antigen peptide is at the most about 5 mRNA transcripts in a non-target essential tissue per one million total mRNA transcripts in each respective non-target tissue of the subject; and wherein an mRNA expression level of the gene encoding the tissue-specific antigen peptide is at least about 100 mRNA transcripts per one million total mRNA transcripts in the target tissue.

101. The method of claim 96, wherein
(i) the human subject is a female subject, and the tissue-specific antigen is specific to a non-essential tissue selected from the group consisting of: Bulbourethral gland, epididymis, penis, prostate, scrotum, seminal vesicle, testicle, and any combination thereof,
(ii) the human subject is a male subject, and the tissue-specific antigen is specific to a non-essential tissue selected from the group consisting of: Bartholin's gland, fallopian tube, ovary, Skene's gland, uterus, cervix, vagina, and any combination thereof,
(iii) the human subject is a Type I diabetes patient, and the tissue-specific antigen is specific to pancreas; or
(iv) the human subject has auto-immune thyroid condition, and the tissue-specific antigen is specific to thyroid.

102. The method of claim 96, wherein the human subject is a female subject, and the tissue-specific antigen is specific to prostate.

103. The method of claim 95, wherein the tissue-specific antigen peptide of (a) is an isolated, purified, and/or synthetic peptide; and wherein the tissue-specific antigen peptide further comprises an accessory sequence flanking the epitope sequence.

104. The method of claim 95, wherein the polynucleotide encoding the tissue-specific antigen peptide of (b) is an mRNA.

105. The method of claim 95, wherein the at least one antigen specific T cell comprises an exogenous sequence encoding the TCR.

106. The method of claim 95, wherein the tissue-specific antigen peptide comprising the epitope sequence of the polypeptide is encoded by the gene selected from the group consisting of ANKRD30A, COL10A1, CTCFL, PPIAL4G, POTEE, DLL3, MMP13, SSX1, DCAF4L2, MAGEA4, MAGEA11, MAGEC2, MAGEA12, PRAME, CLDN6, EPYC, KLK3, KLK2, KLK4, TGM4, POTEG, RLN1, POTEH, SLC45A2, TSPAN10, PAGE5, CSAG1, PRDM7, TG, TSHR, RSPH6A, SCXB, HIST1H4K, ALPPL2, PRM2, PRM1, TNP1, LELP1, HMGB4, AKAP4, CETN1, UBQLN3, ACTL7A, ACTL9, ACTRT2, PGK2, C2orf53, KIF2B, ADAD1, SPATA8, CCDC70, TPD52L3, ACTL7B, DMRTB1, SYCN, CELA2A, CELA2B, PNLIPRP1, CTRC, AMY2A, SERPINI2, RBPJL, AQP12A, IAPP, KIRREL2, G6PC2, AQP12B, CYP11BI, CYP11B2, STAR, CYP11A1, and MC2R; or
wherein the epitope sequence has from 70% to 100% sequence identity to a peptide sequence selected from the group consisting of SEQ ID NOs 1-8962.

107. The method of claim 95, wherein the epitope sequence has from 70% to 100% sequence identity to a peptide sequence selected from the group consisting of SEQ ID NOs: 3441-4274, 5285-6084, 6580-6845, and 8100-8434.

108. The method of claim 95, wherein the protein comprising the tissue-specific antigen peptide comprising the epitope sequence is KLK2, KLK3 or KLK4, and wherein the non-essential tissue is prostate.

109. The method of claim 95, wherein the protein comprising the tissue-specific antigen peptide comprising the epitope sequence is KLK2.

110. The method of claim 95, wherein the epitope sequence has from 70% to 100% sequence identity to a peptide sequence selected from the group consisting of SEQ ID NOs: 3441-3721, 3723, 3729, 3736, 3744, 3752, 3757, 3778, 3794, 3804, 3811, 3813, 3816, 3822, 3824, 3829, 3831, 3833, 3835, 3844, 3850, 3854, 3854, 3869, 3879, 3905, 3916, 3923, 3928, 3944, 3959, 3961, 3972, 3975, 3993, 3998, 3999, and 4001.

111. The method of claim 95, wherein the epitope sequence is selected from the group consisting of AYSEKVTEF (SEQ ID NO: 3534), GLWTGGKDTCGV (SEQ ID NO: 3468), QRVPVSHSF (SEQ ID NO: 3544), SLQCVSLHL (SEQ ID NO: 3456), VILLGRHSL (SEQ ID NO: 3891), RPRSLQCVSL (SEQ ID NO: 3578), SLQCVSLHL (SEQ ID NO: 3456), and YSEKVTEFML (SEQ ID NO: 3454).

112. The method of claim 95, wherein the TCR is specific to a complex of:
1) the epitope sequence is AYSEKVTEF (SEQ ID NO: 3534) and the human subject expresses a protein encoded by an HLA-C06:02 or HLA-A24:02 allele,
2) the epitope sequence is GLWTGGKDTCGV (SEQ ID NO: 3468) and the human subject expresses a protein encoded by an HLA-A02:01 allele,
3) the epitope sequence is QRVPVSHSF (SEQ ID NO: 3544) and the human subject expresses a protein encoded by an HLA-C*07:01, HLA-C*07:02 or HLA-A24:02 allele,
4) the epitope sequence is SLQCVSLHL (SEQ ID NO: 3456) and the human subject expresses a protein encoded by an HLA-A02:01 allele,
5) the epitope sequence is RPRSLQCVSL (SEQ ID NO: 3578) and the human subject expresses a protein encoded by an HLA-B07:02 allele,
6) the epitope sequence is SLQCVSLHL (SEQ ID NO: 3456) and the human subject expresses a protein encoded by an HLA-A02:01 allele, or
7) the epitope sequence is YSEKVTEFML (SEQ ID NO: 3454) and the human subject expresses a protein encoded by an HLA-A01:01 allele.

113. The method of claim 112, wherein the antigen specific T cell comprises the TCR of any one of 1)-7).

114. A method of preparing T cells comprising a T cell receptor (TCR) specific to a complex of (i) an epitope sequence of a tissue specific antigen peptide and (ii) a protein encoded by an HLA allele of a human subject, the method comprising:
(a) contacting a T cell ex vivo with an antigen peptide in complex with an HLA of an APC, wherein the T cell has reduced on no tolerance for the antigenic peptide,
(b) determining a sequence of a TCR of the T cell that recognizes the antigen peptide in complex with the HLA, wherein the T cell has reduced or no immune tolerance to a tissue of origin of the antigen peptide;
(c) (i) expanding the T cell in presence of the antigen peptide in complex with the HLA, or (ii) expressing a recombinant polynucleic acid encoding the sequence of the TCR in isolated T cells;
thereby preparing the T cells comprising the TCR; and
wherein the T cell is from a subject, wherein the tissue-specific antigen is specific to a non-essential tissue, and wherein the non-essential tissue is a tissue not required for survival of a human.

115. A composition comprising:
(a) a tissue-specific antigen peptide comprising an epitope sequence of a polypeptide encoded by a gene selected from the group consisting of KLK2, KLK3 and KLK4;
(b) a polynucleotide encoding the tissue-specific antigen peptide;
(c) one or more antigen presenting cells (APCs) presenting the epitope sequence;
(d) a T cell receptor (TCR) or an antibody, or a functional part thereof that is specific to a complex of (i) the epitope sequence and (ii) a protein encoded by an HLA allele; or
(e) a population of immune cells from a biological sample comprising at least one antigen specific T cell comprising the TCR.

The application's sequence listing, which the Patent Office published only in electronic form, follows.

SEQUENCE LISTING (8970 sequences)

SEQ ID NO: 1 - protein, 10 aa, Homo sapiens
FNTPAMHIAY

SEQ ID NO: 2 - protein, 10 aa, Homo sapiens
WDTVQDIWEY

SEQ ID NO: 3 - protein, 9 aa, Homo sapiens
NTPAMHIAY

SEQ ID NO: 4 - protein, 10 aa, Homo sapiens
TVQDIWEYLF

SEQ ID NO: 5 - protein, 8 aa, Homo sapiens
LSEHTIRY

SEQ ID NO: 6 - protein, 10 aa, Homo sapiens
VVEVGHGVSY

SEQ ID NO: 7 - protein, 10 aa, Homo sapiens
YEEHGPFFLY

SEQ ID NO: 8 - protein, 9 aa, Homo sapiens
YLLGLLNSA

SEQ ID NO: 9 - protein, 10 aa, Homo sapiens
MLFEAFNTPA

SEQ ID NO: 10 - protein, 9 aa, Homo sapiens
YLFRQEMKI

SEQ ID NO: 11 - protein, 9 aa, Homo sapiens
MLSGFPNRL

SEQ ID NO: 12 - protein, 10 aa, Homo sapiens
SLQGFQPLWV

SEQ ID NO: 13 - protein, 12 aa, Homo sapiens
FLCSEMFFKPSL

SEQ ID NO: 14 - protein, 10 aa, Homo sapiens
AYLLGLLNSA

SEQ ID NO: 15 - protein, 10 aa, Homo sapiens
SDLTAYLLGL

SEQ ID NO: 16 - protein, 10 aa, Homo sapiens
ILLCGGSTML

SEQ ID NO: 17 - protein, 9 aa, Homo sapiens
KIAPEEHAV

SEQ ID NO: 18 - protein, 10 aa, Homo sapiens
VLPDGKEIQL

SEQ ID NO: 19 - protein, 10 aa, Homo sapiens
ALDPIEEKKV

SEQ ID NO: 20 - protein, 11 aa, Homo sapiens
YVLPDGKEIQL

SEQ ID NO: 21 - protein, 9 aa, Homo sapiens
VLPERDSAV

SEQ ID NO: 22 - protein, 9 aa, Homo sapiens
RTSGLVVEV

SEQ ID NO: 23 - protein, 11 aa, Homo sapiens
MLSGFPNRLQK

SEQ ID NO: 24 - protein, 9 aa, Homo sapiens
MFFKPSLIK

SEQ ID NO: 25 - protein, 10 aa, Homo sapiens
RFLCSEMFFK

SEQ ID NO: 26 - protein, 10 aa, Homo sapiens
AIMGDGPTKK

SEQ ID NO: 27 - protein, 9 aa, Homo sapiens
AIMGDGPTK

SEQ ID NO: 28 - protein, 9 aa, Homo sapiens
SGFPNRLQK

SEQ ID NO: 29 - protein, 10 aa, Homo sapiens
STMLSGFPNR

SEQ ID NO: 30 - protein, 9 aa, Homo sapiens
FLCSEMFFK

SEQ ID NO: 31 - protein, 11 aa, Homo sapiens
HTIRYVLPDGK

SEQ ID NO: 32 - protein, 10 aa, Homo sapiens
AIMGDGPTKK

SEQ ID NO: 33 - protein, 9 aa, Homo sapiens
AIMGDGPTK

SEQ ID NO: 34 - protein, 10 aa, Homo sapiens
KYAEMLFEAF

SEQ ID NO: 35 - protein, 9 aa, Homo sapiens
RFLCSEMFF

SEQ ID NO: 36 - protein, 10 aa, Homo sapiens
GFQPLWVHRF

SEQ ID NO: 37 - protein, 9 aa, Homo sapiens
EYEEHGPFF

SEQ ID NO: 38 - protein, 9 aa, Homo sapiens
SGFPNRLQK

SEQ ID NO: 39 - protein, 9 aa, Homo sapiens
MFFKPSLIK

SEQ ID NO: 40 - protein, 9 aa, Homo sapiens
QSRLSMYSY

SEQ ID NO: 41 - protein, 9 aa, Homo sapiens
RTSGLVVEV

SEQ ID NO: 42 - protein, 10 aa, Homo sapiens
HTQTVSCLNK

SEQ ID NO: 43 - protein, 9 aa, Homo sapiens
HLKLVNPLR

SEQ ID NO: 44 - protein, 10 aa, Homo sapiens
STMLSGFPNR

SEQ ID NO: 45 - protein, 9 aa, Homo sapiens
TMLSGFPNR

SEQ ID NO: 46 - protein, 9 aa, Homo sapiens
ETAKTGDNR

SEQ ID NO: 47 - protein, 9 aa, Homo sapiens
EHGPFFLYR

SEQ ID NO: 48 - protein, 9 aa, Homo sapiens
VPIYEGYPL

SEQ ID NO: 49 - protein, 10 aa, Homo sapiens
RPKQEVTKAV

SEQ ID NO: 50 - protein, 9 aa, Homo sapiens
FPNRLQKEL

SEQ ID NO: 51 - protein, 8 aa, Homo sapiens
APLQTQAL

SEQ ID NO: 52 - protein, 9 aa, Homo sapiens
LPDGKEIQL

SEQ ID NO: 53 - protein, 10 aa, Homo sapiens
NVHLKLVNPL

SEQ ID NO: 54 - protein, 8 aa, Homo sapiens
HLKLVNPL

SEQ ID NO: 55 - protein, 9 aa, Homo sapiens
TNREKYAEM

SEQ ID NO: 56 - protein, 8 aa, Homo sapiens
DIKKKCCF

SEQ ID NO: 57 - protein, 9 aa, Homo sapiens
DIKKKCCFV

SEQ ID NO: 58 - protein, 8 aa, Homo sapiens
DIALKRDL

SEQ ID NO: 59 - protein, 10 aa, Homo sapiens
SEMFFKPSLI

SEQ ID NO: 60 - protein, 9 aa, Homo sapiens
YEGYPLPSI

SEQ ID NO: 61 - protein, 9 aa, Homo sapiens
SEMFFKPSL

SEQ ID NO: 62 - protein, 11 aa, Homo sapiens
FEYEEHGPFFL

SEQ ID NO: 63 - protein, 9 aa, Homo sapiens
GLPRPTHKI

SEQ ID NO: 64 - protein, 9 aa, Homo sapiens
YLFRQEMKI

SEQ ID NO: 65 - protein, 9 aa, Homo sapiens
RTSGLVVEV

SEQ ID NO: 66 - protein, 9 aa, Homo sapiens
YAGSDLTAY

SEQ ID NO: 67 - protein, 9 aa, Homo sapiens
IAYQSRLSM

SEQ ID NO: 68 - protein, 9 aa, Homo sapiens
YSYGRTSGL

SEQ ID NO: 69 - protein, 9 aa, Homo sapiens
YVVPIYEGY

SEQ ID NO: 70 - protein, 9 aa, Homo sapiens
VEVGHGVSY

SEQ ID NO: 71 - protein, 9 aa, Homo sapiens
YSYGRTSGL

SEQ ID NO: 72 - protein, 9 aa, Homo sapiens
IAPEEHAVL

SEQ ID NO: 73 - protein, 9 aa, Homo sapiens
IAYQSRLSM

SEQ ID NO: 74 - protein, 9 aa, Homo sapiens
VLPERDSAV

SEQ ID NO: 75 - protein, 9 aa, Homo sapiens
QAPLQTQAL

SEQ ID NO: 76 - protein, 9 aa, Homo sapiens
YSYGRTSGL

SEQ ID NO: 77 - protein, 9 aa, Homo sapiens
IAYQSRLSM

SEQ ID NO: 78 - protein, 9 aa, Homo sapiens
SAVWTGGSI

SEQ ID NO: 79 - protein, 9 aa, Homo sapiens
ASLQGFQPL

SEQ ID NO: 80 - protein, 9 aa, Homo sapiens
IAPEEHAVL

SEQ ID NO: 81 - protein, 10 aa, Homo sapiens
FEYEEHGPFF

SEQ ID NO: 82 - protein, 9 aa, Homo sapiens
MWAPPAAIM

SEQ ID NO: 83 - protein, 9 aa, Homo sapiens
YEEHGPFFL

SEQ ID NO: 84 - protein, 9 aa, Homo sapiens
VQDIWEYLF

SEQ ID NO: 85 - protein, 9 aa, Homo sapiens
EYEEHGPFF

SEQ ID NO: 86 - protein, 8 aa, Homo sapiens
VQDIWEYL

SEQ ID NO: 87 - protein, 9 aa, Homo sapiens
YSYGRTSGL

SEQ ID NO: 88 - protein, 9 aa, Homo sapiens
MHIAYQSRL

SEQ ID NO: 89 - protein, 10 aa, Homo sapiens
YSYGRTSGLV

SEQ ID NO: 90 - protein, 8 aa, Homo sapiens
LRHGIIVD

SEQ ID NO: 91 - protein, 8 aa, Homo sapiens
TVQDIWEY

SEQ ID NO: 92 - protein, 9 aa, Homo sapiens
HRFEYEEHG

SEQ ID NO: 93 - protein, 9 aa, Homo sapiens
YSYGRTSGL

SEQ ID NO: 94 - protein, 9 aa, Homo sapiens
MHIAYQSRL

SEQ ID NO: 95 - protein, 9 aa, Homo sapiens
FKPSLIKSM

SEQ ID NO: 96 - protein, 9 aa, Homo sapiens
IAPEEHAVL

SEQ ID NO: 97 - protein, 8 aa, Homo sapiens
SRLSMYSY

SEQ ID NO: 98 - protein, 10 aa, Homo sapiens
VTSQSLLSIY

SEQ ID NO: 99 - protein, 9 aa, Homo sapiens
FTDDHLHII

SEQ ID NO: 100 - protein, 9 aa, Homo sapiens
TSQSLLSIY

SEQ ID NO: 101 - protein, 8 aa, Homo sapiens
IIDLGSQY

SEQ ID NO: 102 - protein, 8 aa, Homo sapiens
FTDDHLHI

SEQ ID NO: 103 - protein, 9 aa, Homo sapiens
YLMQLLNEA

SEQ ID NO: 104 - protein, 10 aa, Homo sapiens
LMFETFGIPA

SEQ ID NO: 105 - protein, 11 aa, Homo sapiens
YAELMFETFGI

SEQ ID NO: 106 - protein, 9 aa, Homo sapiens
FLPEEELGL

SEQ ID NO: 107 - protein, 10 aa, Homo sapiens
AELMFETFGI

SEQ ID NO: 108 - protein, 9 aa, Homo sapiens
ELMFETFGI

SEQ ID NO: 109 - protein, 10 aa, Homo sapiens
FLPEEELGLV

SEQ ID NO: 110 - protein, 8 aa, Homo sapiens
LMFETFGI

SEQ ID NO: 111 - protein, 10 aa, Homo sapiens
NYLMQLLNEA

SEQ ID NO: 112 - protein, 9 aa, Homo sapiens
KILPEEHAV

SEQ ID NO: 113 - protein, 9 aa, Homo sapiens
GLVPEELRV

SEQ ID NO: 114 - protein, 10 aa, Homo sapiens
ILPEEHAVLV

SEQ ID NO: 115 - protein, 9 aa, Homo sapiens
ILPEEHAVL

SEQ ID NO: 116 - protein, 10 aa, Homo sapiens
SLAGSTQPGL

SEQ ID NO: 117 - protein, 10 aa, Homo sapiens
LLCPGDSPAV

SEQ ID NO: 118 - protein, 10 aa, Homo sapiens
SLLSIYSYGK

SEQ ID NO: 119 - protein, 9 aa, Homo sapiens
KMKPRKVHK

SEQ ID NO: 120 - protein, 9 aa, Homo sapiens
LLSIYSYGK

SEQ ID NO: 121 - protein, 9 aa, Homo sapiens
AVAAAPERK

SEQ ID NO: 122 - protein, 9 aa, Homo sapiens
HIIEHIKKK

SEQ ID NO: 123 - protein, 10 aa, Homo sapiens
SLLSIYSYGK

SEQ ID NO: 124 - protein, 9 aa, Homo sapiens
AVAAAPERK

SEQ ID NO: 125 - protein, 9 aa, Homo sapiens
LLSIYSYGK

SEQ ID NO: 126 - protein, 11 aa, Homo sapiens
VIIDLGSQYCK

SEQ ID NO: 127 - protein, 9 aa, Homo sapiens
AFQQLWVSK

SEQ ID NO: 128 - protein, 10 aa, Homo sapiens
KYAELMFETF

SEQ ID NO: 129 - protein, 9 aa, Homo sapiens
RFRCSEMLF

SEQ ID NO: 130 - protein, 11 aa, Homo sapiens
EKYAELMFETF

SEQ ID NO: 131 - protein, 11 aa, Homo sapiens
GYAGEPRPTYF

SEQ ID NO: 132 - protein, 9 aa, Homo sapiens
AFTDDHLHI

SEQ ID NO: 133 - protein, 9 aa, Homo sapiens
KMKPRKVHK

SEQ ID NO: 134 - protein, 9 aa, Homo sapiens
ATRNSPMPL

SEQ ID NO: 135 - protein, 10 aa, Homo sapiens
MATRNSPMPL

SEQ ID NO: 136 - protein, 9 aa, Homo sapiens
KIKAVIIDL

SEQ ID NO: 137 - protein, 9 aa, Homo sapiens
HIIEHIKKK

SEQ ID NO: 138 - protein, 9 aa, Homo sapiens
TMLDGFPER

SEQ ID NO: 139 - protein, 9 aa, Homo sapiens
DVLPGLTSR

SEQ ID NO: 140 - protein, 10 aa, Homo sapiens
CTMLDGFPER

SEQ ID NO: 141 - protein, 9 aa, Homo sapiens
EAADAGDTR

SEQ ID NO: 142 - protein, 9 aa, Homo sapiens
APLKLVNPL

SEQ ID NO: 143 - protein, 10 aa, Homo sapiens
RPTYFISSTV

SEQ ID NO: 144 - protein, 9 aa, Homo sapiens
FPERFQREL

SEQ ID NO: 145 - protein, 9 aa, Homo sapiens
SPMPLGTAQ

SEQ ID NO: 146 - protein, 9 aa, Homo sapiens
VPISEGDVL

SEQ ID NO: 147 - protein, 9 aa, Homo sapiens
SNREKYAEL

SEQ ID NO: 148 - protein, 9 aa, Homo sapiens
HIKKKCCYA

SEQ ID NO: 149 - protein, 11 aa, Homo sapiens
HIKKKCCYAAF

SEQ ID NO: 150 - protein, 9 aa, Homo sapiens
AGDTRKWTL

SEQ ID NO: 151 - protein, 9 aa, Homo sapiens
AAPERKTSV

SEQ ID NO: 152 - protein, 9 aa, Homo sapiens
ERFQRELSL

SEQ ID NO: 153 - protein, 10 aa, Homo sapiens
AELMFETFGI

SEQ ID NO: 154 - protein, 9 aa, Homo sapiens
SEMLFQPSL

SEQ ID NO: 155 - protein, 11 aa, Homo sapiens
WEYIFRTAMKI

SEQ ID NO: 156 - protein, 9 aa, Homo sapiens
GLVPEELRV

SEQ ID NO: 157 - protein, 9 aa, Homo sapiens
YIFRTAMKI

SEQ ID NO: 158 - protein, 8 aa, Homo sapiens
HLHIIEHI

SEQ ID NO: 159 - protein, 9 aa, Homo sapiens
YSYGKTSGL

SEQ ID NO: 160 - protein, 9 aa, Homo sapiens
LLNEAGHAF

SEQ ID NO: 161 - protein, 9 aa, Homo sapiens
SILASLQAF

SEQ ID NO: 162 - protein, 9 aa, Homo sapiens
VIIDLGSQY

SEQ ID NO: 163 - protein, 9 aa, Homo sapiens
YAGEPRPTY

SEQ ID NO: 164 - protein, 9 aa, Homo sapiens
AMHVTSQSL

SEQ ID NO: 165 - protein, 9 aa, Homo sapiens
YSYGKTSGL

SEQ ID NO: 166 - protein, 9 aa, Homo sapiens
ILPEEHAVL

SEQ ID NO: 167 - protein, 9 aa, Homo sapiens
FTDDHLHII

SEQ ID NO: 168 - protein, 9 aa, Homo sapiens
AAPERKTSV

SEQ ID NO: 169 - protein, 9 aa, Homo sapiens
FLPEEELGL

SEQ ID NO: 170 - protein, 9 aa, Homo sapiens
YSYGKTSGL

SEQ ID NO: 171 - protein, 10 aa, Homo sapiens
MATRNSPMPL

SEQ ID NO: 172 - protein, 9 aa, Homo sapiens
SVWTGGSIL

SEQ ID NO: 173 - protein, 9 aa, Homo sapiens
STQPGLPEL

SEQ ID NO: 174 - protein, 9 aa, Homo sapiens
AAFLPEEEL

SEQ ID NO: 175 - protein, 9 aa, Homo sapiens
FTDDHLHII

SEQ ID NO: 176 - protein, 9 aa, Homo sapiens
MLDGFPERF

SEQ ID NO: 177 - protein, 9 aa, Homo sapiens
RFRCSEMLF

SEQ ID NO: 178 - protein, 9 aa, Homo sapiens
VQDIWEYIF

SEQ ID NO: 179 - protein, 9 aa, Homo sapiens
ERFQRELSL

SEQ ID NO: 180 - protein, 9 aa, Homo sapiens
YSYGKTSGL

SEQ ID NO: 181 - protein, 9 aa, Homo sapiens
ERFRCSEML

SEQ ID NO: 182 - protein, 9 aa, Homo sapiens
TRPGPDASL

SEQ ID NO: 183 - protein, 9 aa, Homo sapiens
LRVDYELPD

SEQ ID NO: 184 - protein, 9 aa, Homo sapiens
YSYGKTSGL

SEQ ID NO: 185 - protein, 9 aa, Homo sapiens
ERFQRELSL

SEQ ID NO: 186 - protein, 9 aa, Homo sapiens
RFRCSEMLF

SEQ ID NO: 187 - protein, 9 aa, Homo sapiens
TRPGPDASL

SEQ ID NO: 188 - protein, 9 aa, Homo sapiens
ILPEEHAVL

SEQ ID NO: 189 - protein, 8 aa, Homo sapiens
TRNSPMPL

SEQ ID NO: 190 - protein, 10 aa, Homo sapiens
VVDTGHGVTY

SEQ ID NO: 191 - protein, 9 aa, Homo sapiens
YTVPVFQGY

SEQ ID NO: 192 - protein, 9 aa, Homo sapiens
ASQSVLSVY

SEQ ID NO: 193 - protein, 9 aa, Homo sapiens
LVENIKHHY

SEQ ID NO: 194 - protein, 9 aa, Homo sapiens
FLAEMLLQA

SEQ ID NO: 195 - protein, 9 aa, Homo sapiens
HLLEHDLRV

SEQ ID NO: 196 - protein, 11 aa, Homo sapiens
FLAEMLLQAGL

SEQ ID NO: 197 - protein, 10 aa, Homo sapiens
KLVEVAFESL

SEQ ID NO: 198 - protein, 9 aa, Homo sapiens
MLLQAGLPL

SEQ ID NO: 199 - protein, 9 aa, Homo sapiens
AMYVASQSV

SEQ ID NO: 200 - protein, 10 aa, Homo sapiens
AFLAEMLLQA

SEQ ID NO: 201 - protein, 9 aa, Homo sapiens
RVLPELTLV

SEQ ID NO: 202 - protein, 12 aa, Homo sapiens
AFLAEMLLQAGL

SEQ ID NO: 203 - protein, 10 aa, Homo sapiens
KLPDGRTVTL

SEQ ID NO: 204 - protein, 9 aa, Homo sapiens
ELLFNPPEV

SEQ ID NO: 205 - protein, 9 aa, Homo sapiens
ALPAETHVV

SEQ ID NO: 206 - protein, 8 aa, Homo sapiens
LLFNPPEV

SEQ ID NO: 207 - protein, 10 aa, Homo sapiens
STMAKQSLRK

SEQ ID NO: 208 - protein, 9 aa, Homo sapiens
TMAKQSLRK

SEQ ID NO: 209 - protein, 10 aa, Homo sapiens
GMVADRLPPK

SEQ ID NO: 210 - protein, 9 aa, Homo sapiens
MVADRLPPK

SEQ ID NO: 211 - protein, 11 aa, Homo sapiens
VVIDMGTGTCK

SEQ ID NO: 212 - protein, 10 aa, Homo sapiens
STMAKQSLRK

SEQ ID NO: 213 - protein, 9 aa, Homo sapiens
MVADRLPPK

SEQ ID NO: 214 - protein, 9 aa, Homo sapiens
ATILGCQPK

SEQ ID NO: 215 - protein, 11 aa, Homo sapiens
VVIDMGTGTCK

SEQ ID NO: 216 - protein, 10 aa, Homo sapiens
ATILGCQPKK

SEQ ID NO: 217 - protein, 9 aa, Homo sapiens
LFQCPELLF

SEQ ID NO: 218 - protein, 9 aa, Homo sapiens
HYCYVASDF

SEQ ID NO: 219 - protein, 9 aa, Homo sapiens
MYVASQSVL

SEQ ID NO: 220 - protein, 10 aa, Homo sapiens
HHYCYVASDF

SEQ ID NO: 221 - protein, 9 aa, Homo sapiens
QYEEQGPYI

SEQ ID NO: 222 - protein, 9 aa, Homo sapiens
RFRAELLRA

SEQ ID NO: 223 - protein, 9 aa, Homo sapiens
SLRSPAMYV

SEQ ID NO: 224 - protein, 9 aa, Homo sapiens
MVADRLPPK

SEQ ID NO: 225 - protein, 9 aa, Homo sapiens
ASRPKSSES

SEQ ID NO: 226 - protein, 9 aa, Homo sapiens
ATILGCQPK

SEQ ID NO: 227 - protein, 9 aa, Homo sapiens
NIKHHYCYV

SEQ ID NO: 228 - protein, 9 aa, Homo sapiens
STMAKQSLR

SEQ ID NO: 229 - protein, 9 aa, Homo sapiens
QTFIGEAAR

SEQ ID NO: 230 - protein, 10 aa, Homo sapiens
SVLSVYAHGR

SEQ ID NO: 231 - protein, 10 aa, Homo sapiens
EEQGPYIVYR

SEQ ID NO: 232 - protein, 9 aa, Homo sapiens
EQGPYIVYR

SEQ ID NO: 233 - protein, 9 aa, Homo sapiens
NVVNKPLQR

SEQ ID NO: 234 - protein, 9 aa, Homo sapiens
SPNVVNKPL

SEQ ID NO: 235 - protein, 10 aa, Homo sapiens
KPATSGQSGL

SEQ ID NO: 236 - protein, 10 aa, Homo sapiens
RPEQEYKRTL

SEQ ID NO: 237 - protein, 9 aa, Homo sapiens
LPDGRTVTL

SEQ ID NO: 238 - protein, 9 aa, Homo sapiens
SPATNREKL

SEQ ID NO: 239 - protein, 11 aa, Homo sapiens
MAKQSLRKLSL

SEQ ID NO: 240 - protein, 9 aa, Homo sapiens
NIKHHYCYV

SEQ ID NO: 241 - protein, 12 aa, Homo sapiens
TMAKQSLRKLSL

SEQ ID NO: 242 - protein, 9 aa, Homo sapiens
KQSLRKLSL

SEQ ID NO: 243 - protein, 8 aa, Homo sapiens
ELIWRHLL

SEQ ID NO: 244 - protein, 8 aa, Homo sapiens
EQEYKRTL

SEQ ID NO: 245 - protein, 9 aa, Homo sapiens
VDWDAAELI

SEQ ID NO: 246 - protein, 10 aa, Homo sapiens
VVDWDAAELI

SEQ ID NO: 247 - protein, 9 aa, Homo sapiens
AELIWRHLL

SEQ ID NO: 248 - protein, 9 aa, Homo sapiens
GQSGLQTFI

SEQ ID NO: 249 - protein, 9 aa, Homo sapiens
GQASPTYTV

SEQ ID NO: 250 - protein, 9 aa, Homo sapiens
RVLPELTLV

SEQ ID NO: 251 - protein, 9 aa, Homo sapiens
YTVPVFQGY

SEQ ID NO: 252 - protein, 9 aa, Homo sapiens
FAGQASPTY

SEQ ID NO: 253 - protein, 9 aa, Homo sapiens
FSVWIGGSI

SEQ ID NO: 254 - protein, 9 aa, Homo sapiens
VAAQPTRNF

SEQ ID NO: 255 - protein, 9 aa, Homo sapiens
VLREQYEEQ

SEQ ID NO: 256 - protein, 9 aa, Homo sapiens
ASRPKSSES

SEQ ID NO: 257 - protein, 9 aa, Homo sapiens
MLLQAGLPL

SEQ ID NO: 258 - protein, 9 aa, Homo sapiens
LSPVGLSTM

SEQ ID NO: 259 - protein, 9 aa, Homo sapiens
FIGEAARVL

SEQ ID NO: 260 - protein, 10 aa, Homo sapiens
KLPDGRTVTL

SEQ ID NO: 261 - protein, 9 aa, Homo sapiens
FSPATNREK

SEQ ID NO: 262 - protein, 9 aa, Homo sapiens
YAHGRVSGL

SEQ ID NO: 263 - protein, 9 aa, Homo sapiens
MLLQAGLPL

SEQ ID NO: 264 - protein, 9 aa, Homo sapiens
FSVWIGGSI

SEQ ID NO: 265 - protein, 9 aa, Homo sapiens
FIGEAARVL

SEQ ID NO: 266 - protein, 9 aa, Homo sapiens
FSDPPFSPA

SEQ ID NO: 267 - protein, 9 aa, Homo sapiens
LFQCPELLF

SEQ ID NO: 268 - protein, 9 aa, Homo sapiens
FSDPPFSPA

SEQ ID NO: 269 - protein, 9 aa, Homo sapiens
RLDLAGNHL

SEQ ID NO: 270 - protein, 9 aa, Homo sapiens
VVDWDAAEL

SEQ ID NO: 271 - protein, 9 aa, Homo sapiens
HYCYVASDF

SEQ ID NO: 272 - protein, 9 aa, Homo sapiens
FRAELLRAL

SEQ ID NO: 273 - protein, 9 aa, Homo sapiens
MRADLAQNV

SEQ ID NO: 274 - protein, 10 aa, Homo sapiens
MRADLAQNVL

SEQ ID NO: 275 - protein, 8 aa, Homo sapiens
LRSGIVVD

SEQ ID NO: 276 - protein, 9 aa, Homo sapiens
RAFQSCWVL

SEQ ID NO: 277 - protein, 9 aa, Homo sapiens
RSGIVVDWD

SEQ ID NO: 278 - protein, 9 aa, Homo sapiens
FRAELLRAL

SEQ ID NO: 279 - protein, 9 aa, Homo sapiens
ATHDHPLLF

SEQ ID NO: 280 - protein, 9 aa, Homo sapiens
MYVASQSVL

SEQ ID NO: 281 - protein, 9 aa, Homo sapiens
ARVLPELTL

SEQ ID NO: 282 - protein, 9 aa, Homo sapiens
FNPPEVPGL

SEQ ID NO: 283 - protein, 10 aa, Homo sapiens
LSDQAVLALY

SEQ ID NO: 284 - protein, 11 aa, Homo sapiens
YLSDQAVLALY

SEQ ID NO: 285 - protein, 12 aa, Homo sapiens
FYLSDQAVLALY

SEQ ID NO: 286 - protein, 9 aa, Homo sapiens
DTDIQKILF

SEQ ID NO: 287 - protein, 9 aa, Homo sapiens
LSDQAVLAL

SEQ ID NO: 288 - protein, 9 aa, Homo sapiens
HLFEWELGV

SEQ ID NO: 289 - protein, 10 aa, Homo sapiens
KHLFEWELGV

SEQ ID NO: 290 - protein, 12 aa, Homo sapiens
KMAEVMFENFGV

SEQ ID NO: 291 - protein, 10 aa, Homo sapiens
YLSDQAVLAL

SEQ ID NO: 292 - protein, 9 aa, Homo sapiens
YLSDQAVLA

SEQ ID NO: 293 - protein, 11 aa, Homo sapiens
WKHLFEWELGV

SEQ ID NO: 294 - protein, 10 aa, Homo sapiens
SLSSFKQMWV

SEQ ID NO: 295 - protein, 10 aa, Homo sapiens
VMFENFGVPA

SEQ ID NO: 296 - protein, 12 aa, Homo sapiens
LWKHLFEWELGV

SEQ ID NO: 297 - protein, 10 aa, Homo sapiens
KLPDGNIISL

SEQ ID NO: 298 - protein, 9 aa, Homo sapiens
SLGDPLHQA

SEQ ID NO: 299 - protein, 9 aa, Homo sapiens
RLLKELEQL

SEQ ID NO: 300 - protein, 10 aa, Homo sapiens
GLDDRLLKEL

SEQ ID NO: 301 - protein, 9 aa, Homo sapiens
SLPHAVTKL

SEQ ID NO: 302 - protein, 9 aa, Homo sapiens
GLDDRLLKE

SEQ ID NO: 303 - protein, 9 aa, Homo sapiens
IVTSLSSFK

SEQ ID NO: 304 - protein, 10 aa, Homo sapiens
SIVTSLSSFK

SEQ ID NO: 305 - protein, 12 aa, Homo sapiens
TLFHGLDDRLLK

SEQ ID NO: 306 - protein, 11 aa, Homo sapiens
VIFDNGSGFCK

SEQ ID NO: 307 - protein, 9 aa, Homo sapiens
HTFPCQLDK

SEQ ID NO: 308 - protein, 10 aa, Homo sapiens
HLFEWELGVK

SEQ ID NO: 309 - protein, 10 aa, Homo sapiens
SIVTSLSSFK

SEQ ID NO: 310 - protein, 9 aa, Homo sapiens
IVTSLSSFK

SEQ ID NO: 311 - protein, 9 aa, Homo sapiens
HTFPCQLDK

SEQ ID NO: 312 - protein, 11 aa, Homo sapiens
VIFDNGSGFCK

SEQ ID NO: 313 - protein, 9 aa, Homo sapiens
YSLPHAVTK

SEQ ID NO: 314 - protein, 10 aa, Homo sapiens
KMAEVMFENF

SEQ ID NO: 315 - protein, 9 aa, Homo sapiens
RLWKHLFEW

SEQ ID NO: 316 - protein, 10 aa, Homo sapiens
LYASACVTGL

SEQ ID NO: 317 - protein, 9 aa, Homo sapiens
FYLSDQAVL

SEQ ID NO: 318 - protein, 9 aa, Homo sapiens
VLSGGTTLF

SEQ ID NO: 319 - protein, 9 aa, Homo sapiens
RWFSTWIGA

SEQ ID NO: 320 - protein, 9 aa, Homo sapiens
YSLPHAVTK

SEQ ID NO: 321 - protein, 9 aa, Homo sapiens
HTFPCQLDK

SEQ ID NO: 322 - protein, 10 aa, Homo sapiens
ITKCDTDIQK

SEQ ID NO: 323 - protein, 9 aa, Homo sapiens
GLVDDIKKK

SEQ ID NO: 324 - protein, 9 aa, Homo sapiens
VTKLHVAGR

SEQ ID NO: 325 - protein, 9 aa, Homo sapiens
EFGTSVVQR

SEQ ID NO: 326 - protein, 10 aa, Homo sapiens
EFGTSVVQRR

SEQ ID NO: 327 - protein, 10 aa, Homo sapiens
AVTKLHVAGR

SEQ ID NO: 328 - protein, 12 aa, Homo sapiens
DFKEFGTSVVQR

SEQ ID NO: 329 - protein, 9 aa, Homo sapiens
GPRHMVSSI

SEQ ID NO: 330 - protein, 10 aa, Homo sapiens
FGPRHMVSSI

SEQ ID NO: 331 - protein, 9 aa, Homo sapiens
VPIFEGYSL

SEQ ID NO: 332 - protein, 9 aa, Homo sapiens
LPDGNIISL

SEQ ID NO: 333 - protein, 10 aa, Homo sapiens
QPLLATEPSL

SEQ ID NO: 334 - protein, 9 aa, Homo sapiens
DIKKKLCYV

SEQ ID NO: 335 - protein, 10 aa, Homo sapiens
FGPRHMVSSI

SEQ ID NO: 336 - protein, 11 aa, Homo sapiens
DIKKKLCYVAL

SEQ ID NO: 337 - protein, 9 aa, Homo sapiens
EANQKKYFV

SEQ ID NO: 338 - protein, 9 aa, Homo sapiens
EALYKQEAL

SEQ ID NO: 339 - protein, 10 aa, Homo sapiens
ADFKEFGTSV

SEQ ID NO: 340 - protein, 10 aa, Homo sapiens
AEVMFENFGV

SEQ ID NO: 341 - protein, 10 aa, Homo sapiens
FEGYSLPHAV

SEQ ID NO: 342 - protein, 9 aa, Homo sapiens
HQAPEALFV

SEQ ID NO: 343 - protein, 9 aa, Homo sapiens
HLFEWELGV

SEQ ID NO: 344 - protein, 9 aa, Homo sapiens
KCDTDIQKI

SEQ ID NO: 345 - protein, 9 aa, Homo sapiens
SIVTSLSSF

SEQ ID NO: 346 - protein, 9 aa, Homo sapiens
FSTWIGASI

SEQ ID NO: 347 - protein, 9 aa, Homo sapiens
YASACVTGL

SEQ ID NO: 348 - protein, 9 aa, Homo sapiens
VIFDNGSGF

SEQ ID NO: 349 - protein, 9 aa, Homo sapiens
SSIVGHLKF

SEQ ID NO: 350 - protein, 10 aa, Homo sapiens
ASIVTSLSSF

SEQ ID NO: 351 - protein, 9 aa, Homo sapiens
LSDQAVLAL

SEQ ID NO: 352 - protein, 9 aa, Homo sapiens
YASACVTGL

SEQ ID NO: 353 - protein, 9 aa, Homo sapiens
FSTWIGASI

SEQ ID NO: 354 - protein, 10 aa, Homo sapiens
KLPDGNIISL

SEQ ID NO: 355 - protein, 9 aa, Homo sapiens
SLPHAVTKL

SEQ ID NO: 356 - protein, 10 aa, Homo sapiens
FGPRHMVSSI

SEQ ID NO: 357 - protein, 9 aa, Homo sapiens
YASACVTGL

SEQ ID NO: 358 - protein, 9 aa, Homo sapiens
FSTWIGASI

SEQ ID NO: 359 - protein, 9 aa, Homo sapiens
IVLSGGTTL

SEQ ID NO: 360 - protein, 9 aa, Homo sapiens
HALDSPAVI

SEQ ID NO: 361 - protein, 9 aa, Homo sapiens
VALEPEKEL

SEQ ID NO: 362 - protein, 9 aa, Homo sapiens
LSDQAVLAL

SEQ ID NO: 363 - protein, 11 aa, Homo sapiens
FYLSDQAVLAL

SEQ ID NO: 364 - protein, 9 aa, Homo sapiens
LHQAPEALF

SEQ ID NO: 365 - protein, 9 aa, Homo sapiens
ALDSPAVIF

SEQ ID NO: 366 - protein, 8 aa, Homo sapiens
IFDNGSGF

SEQ ID NO: 367 - protein, 9 aa, Homo sapiens
IFDNGSGFC

SEQ ID NO: 368 - protein, 9 aa, Homo sapiens
FSTWIGASI

SEQ ID NO: 369 - protein, 9 aa, Homo sapiens
NREKMAEVM

SEQ ID NO: 370 - protein, 9 aa, Homo sapiens
FYLSDQAVL

SEQ ID NO: 371 - protein, 9 aa, Homo sapiens
RRPEEVLRE

SEQ ID NO: 372 - protein, 10 aa, Homo sapiens
RRPEEVLREY

SEQ ID NO: 373 - protein, 8 aa, Homo sapiens
SRRPEEVL

SEQ ID NO: 374 - protein, 9 aa, Homo sapiens
FYLSDQAVL

SEQ ID NO: 375 - protein, 9 aa, Homo sapiens
LYKQEALQL

SEQ ID NO: 376 - protein, 9 aa, Homo sapiens
KYFVGEEAL

SEQ ID NO: 377 - protein, 10 aa, Homo sapiens
RRPEEVLREY

SEQ ID NO: 378 - protein, 8 aa, Homo sapiens
SRRPEEVL

SEQ ID NO: 379 - protein, 9 aa, Homo sapiens
LTSKLPMFY

SEQ ID NO: 380 - protein, 10 aa, Homo sapiens
ALTSKLPMFY

SEQ ID NO: 381 - protein, 10 aa, Homo sapiens
VTARRSLLRY

SEQ ID NO: 382 - protein, 12 aa, Homo sapiens
LSELAYVSKVHY

SEQ ID NO: 383 - protein, 9 aa, Homo sapiens
LLSHFIQPV

SEQ ID NO: 384 - protein, 10 aa, Homo sapiens
ALLSHFIQPV

SEQ ID NO: 385 - protein, 9 aa, Homo sapiens
VVLSELAYV

SEQ ID NO: 386 - protein, 9 aa, Homo sapiens
KMASKVTQV

SEQ ID NO: 387 - protein, 9 aa, Homo sapiens
SLVPSAYPL

SEQ ID NO: 388 - protein, 10 aa, Homo sapiens
KLALDELLQL

SEQ ID NO: 389 - protein, 9 aa, Homo sapiens
NLSSISNPV

SEQ ID NO: 390 - protein, 10 aa, Homo sapiens
SLLRYFYRQL

SEQ ID NO: 391 - protein, 9 aa, Homo sapiens
MLSRFNLLA

SEQ ID NO: 392 - protein, 9 aa, Homo sapiens
AMLSRFNLL

SEQ ID NO: 393 - protein, 10 aa, Homo sapiens
AMMEKSIFCT

SEQ ID NO: 394 - protein, 8 aa, Homo sapiens
ALDELLQL

SEQ ID NO: 395 - protein, 11 aa, Homo sapiens
FIIERAGQHEV

SEQ ID NO: 396 - protein, 9 aa, Homo sapiens
VLHDTHAVV

SEQ ID NO: 397 - protein, 8 aa, Homo sapiens
VLSELAYV

SEQ ID NO: 398 - protein, 9 aa, Homo sapiens
QLDEPEPRI

SEQ ID NO: 399 - protein, 9 aa, Homo sapiens
ALDELLQLD

SEQ ID NO: 400 - protein, 10 aa, Homo sapiens
MLSRFNLLAK

SEQ ID NO: 401 - protein, 9 aa, Homo sapiens
CLYMNQLPK

SEQ ID NO: 402 - protein, 10 aa, Homo sapiens
GMSMASRLCK

SEQ ID NO: 403 - protein, 9 aa, Homo sapiens
RVDDALTSK

SEQ ID NO: 404 - protein, 9 aa, Homo sapiens
AVVDGIQYK

SEQ ID NO: 405 - protein, 9 aa, Homo sapiens
MSMASRLCK

SEQ ID NO: 406 - protein, 10 aa, Homo sapiens
SISNPVLPPK

SEQ ID NO: 407 - protein, 9 aa, Homo sapiens
AVVDGIQYK

SEQ ID NO: 408 - protein, 10 aa, Homo sapiens
SSLAAFIIER

SEQ ID NO: 409 - protein, 11 aa, Homo sapiens
VVLSELAYVSK

SEQ ID NO: 410 - protein, 10 aa, Homo sapiens
RYFYRQLLLF

SEQ ID NO: 411 - protein, 9 aa, Homo sapiens
RYFYRQLLL

SEQ ID NO: 412 - protein, 9 aa, Homo sapiens
YFYRQLLLF

SEQ ID NO: 413 - protein, 9 aa, Homo sapiens
KYSSSLAAF

SEQ ID NO: 414 - protein, 9 aa, Homo sapiens
MSMASRLCK

SEQ ID NO: 415 - protein, 9 aa, Homo sapiens
LSRFNLLAK

SEQ ID NO: 416 - protein, 9 aa, Homo sapiens
TARRSLLSK

SEQ ID NO: 417 - protein, 9 aa, Homo sapiens
AVVDGIQYK

SEQ ID NO: 418 - protein, 9 aa, Homo sapiens
KIPKEFIMK

SEQ ID NO: 419 - protein, 9 aa, Homo sapiens
RQLLLFYSK

SEQ ID NO: 420 - protein, 9 aa, Homo sapiens
DTHAVVTAR

SEQ ID NO: 421 - protein, 10 aa, Homo sapiens
YVSKVHYEGR

SEQ ID NO: 422 - protein, 9 aa, Homo sapiens
RSLLRYFYR

SEQ ID NO: 423 - protein, 9 aa, Homo sapiens
RFNQLISNR

SEQ ID NO: 424 - protein, 10 aa, Homo sapiens
ERFNQLISNR

SEQ ID NO: 425 - protein, 9 aa, Homo sapiens
SPFKSGMSM

SEQ ID NO: 426 - protein, 10 aa, Homo sapiens
SSPFKSGMSM

SEQ ID NO: 427 - protein, 9 aa, Homo sapiens
QPVYISSIL

SEQ ID NO: 428 - protein, 9 aa, Homo sapiens
GPYFAFCAV

SEQ ID NO: 429 - protein, 8 aa, Homo sapiens
FPAEPVVL

SEQ ID NO: 430 - protein, 9 aa, Homo sapiens
IVKERFNQL

SEQ ID NO: 431 - protein, 9 aa, Homo sapiens
NLEYKFLSL

SEQ ID NO: 432 - protein, 9 aa, Homo sapiens
AMLSRFNLL

SEQ ID NO: 433 - protein, 9 aa, Homo sapiens
DIKPDGRVL

SEQ ID NO: 434 - protein, 9 aa, Homo sapiens
SELAYVSKV

SEQ ID NO: 435 - protein, 9 aa, Homo sapiens
VEGKIYLTV

SEQ ID NO: 436 - protein, 10 aa, Homo sapiens
FAFCAVVDGI

SEQ ID NO: 437 - protein, 9 aa, Homo sapiens
AQGDVSLEI

SEQ ID NO: 438 - protein, 9 aa, Homo sapiens
HQFAQMQRV

SEQ ID NO: 439 - protein, 9 aa, Homo sapiens
QQHGYGSWI

SEQ ID NO: 440 - protein, 9 aa, Homo sapiens
FQSSQVPSF

SEQ ID NO: 441 - protein, 9 aa, Homo sapiens
LTSKLPMFY

SEQ ID NO: 442 - protein, 9 aa, Homo sapiens
LSHFIQPVY

SEQ ID NO: 443 - protein, 9 aa, Homo sapiens
AAKCMSASY

SEQ ID NO: 444 - protein, 9 aa, Homo sapiens
IPKEFIMKY

SEQ ID NO: 445 - protein, 9 aa, Homo sapiens
EAKCKLKSY

SEQ ID NO: 446 - protein, 9 aa, Homo sapiens
SAYPLQMNL

SEQ ID NO: 447 - protein, 9 aa, Homo sapiens
YSSSLAAFI

SEQ ID NO: 448 - protein, 9 aa, Homo sapiens
SLVPSAYPL

SEQ ID NO: 449 - protein, 9 aa, Homo sapiens
QVPSFAQML

SEQ ID NO: 450 - protein, 10 aa, Homo sapiens
SSPFKSGMSM

SEQ ID NO: 451 - protein, 9 aa, Homo sapiens
AEPVVLSEL

SEQ ID NO: 452 - protein, 9 aa, Homo sapiens
SAYPLQMNL

SEQ ID NO: 453 - protein, 9 aa, Homo sapiens
SAFEANEEL

SEQ ID NO: 454 - protein, 9 aa, Homo sapiens
VAVEGKIYL

SEQ ID NO: 455 - protein, 9 aa, Homo sapiens
FAQMQRVQL

SEQ ID NO: 456 - protein, 9 aa, Homo sapiens
FYSKNPAMM

SEQ ID NO: 457 - protein, 9 aa, Homo sapiens
RYFYRQLLL

SEQ ID NO: 458 - protein, 9 aa, Homo sapiens
YSSSLAAFI

SEQ ID NO: 459 - protein, 9 aa, Homo sapiens
PFPAEPVVL

SEQ ID NO: 460 - protein, 8 aa, Homo sapiens
ALDELLQL

SEQ ID NO: 461 - protein, 9 aa, Homo sapiens
LRYFYRQLL

SEQ ID NO: 462 - protein, 10 aa, Homo sapiens
LRYFYRQLLL

SEQ ID NO: 463 - protein, 9 aa, Homo sapiens
RYFYRQLLL

SEQ ID NO: 464 - protein, 9 aa, Homo sapiens
TRWEVLGVQ

SEQ ID NO: 465 - protein, 8 aa, Homo sapiens
LRYFYRQL

SEQ ID NO: 466 - protein, 8 aa, Homo sapiens
RRSLLRYF

SEQ ID NO: 467 - protein, 9 aa, Homo sapiens
LRYFYRQLL

SEQ ID NO: 468 - protein, 9 aa, Homo sapiens
RYFYRQLLL

SEQ ID NO: 469 - protein, 9 aa, Homo sapiens
FYSKNPAMM

SEQ ID NO: 470 - protein, 8 aa, Homo sapiens
IKPDGRVL

SEQ ID NO: 471 - protein, 9 aa, Homo sapiens
HYEGRHIQY

SEQ ID NO: 472 - protein, 9 aa, Homo sapiens
YADQVNIDY

SEQ ID NO: 473 - protein, 12 aa, Homo sapiens
FADSISKGLMVY

SEQ ID NO: 474 - protein, 12 aa, Homo sapiens
YSVYADQVNIDY

SEQ ID NO: 475 - protein, 9 aa, Homo sapiens
SSENCYSVY

SEQ ID NO: 476 - protein, 9 aa, Homo sapiens
CSIDDLSFY

SEQ ID NO: 477 - protein, 9 aa, Homo sapiens
YSDTTMMSD

SEQ ID NO: 478 - protein, 10 aa, Homo sapiens
ASQFNVPMLY

SEQ ID NO: 479 - protein, 9 aa, Homo sapiens
SIDDLSFYV

SEQ ID NO: 480 - protein, 9 aa, Homo sapiens
VLMTDSDFV

SEQ ID NO: 481 - protein, 9 aa, Homo sapiens
MMSDDIDWL

SEQ ID NO: 482 - protein, 9 aa, Homo sapiens
GQLEKLPQV

SEQ ID NO: 483 - protein, 9 aa, Homo sapiens
YLMNRPQNL

SEQ ID NO: 484 - protein, 9 aa, Homo sapiens
LLDWLLANL

SEQ ID NO: 485 - protein, 9 aa, Homo sapiens
FIDKLVESV

SEQ ID NO: 486 - protein, 9 aa, Homo sapiens
GLMVYANQV

SEQ ID NO: 487 - protein, 9 aa, Homo sapiens
KLVESVMKL

SEQ ID NO: 488 - protein, 10 aa, Homo sapiens
QLLDWLLANL

SEQ ID NO: 489 - protein, 12 aa, Homo sapiens
VLMTDSDFVSAV

SEQ ID NO: 490 - protein, 10 aa, Homo sapiens
MDMSNIVLML

SEQ ID NO: 491 - protein, 9 aa, Homo sapiens
WIAASQFNV

SEQ ID NO: 492 - protein, 9 aa, Homo sapiens
ALAELEEQA

SEQ ID NO: 493 - protein, 9 aa, Homo sapiens
SLEEKEIIV

SEQ ID NO: 494 - protein, 9 aa, Homo sapiens
SLQKQLQAV

SEQ ID NO: 495 - protein, 10 aa, Homo sapiens
ALAELEEQAA

SEQ ID NO: 496 - protein, 9 aa, Homo sapiens
YQDSLGHEV

SEQ ID NO: 497 - protein, 10 aa, Homo sapiens
RISPRTPASK

SEQ ID NO: 498 - protein, 10 aa, Homo sapiens
MMVSLMKTLK

SEQ ID NO: 499 - protein, 9 aa, Homo sapiens
FLYSELSNK

SEQ ID NO: 500 - protein, 10 aa, Homo sapiens
SFLYSELSNK

SEQ ID NO: 501 - protein, 10 aa, Homo sapiens
VMKLCLIMAK

SEQ ID NO: 502 - protein, 9 aa, Homo sapiens
KLLNENPFK

SEQ ID NO: 503 - protein, 10 aa, Homo sapiens
ALSPSTSTCK

SEQ ID NO: 504 - protein, 9 aa, Homo sapiens
SQFNVPMLY

SEQ ID NO: 505 - protein, 10 aa, Homo sapiens
ASDMMVSLMK

SEQ ID NO: 506 - protein, 10 aa, Homo sapiens
SQSLSYASLK

SEQ ID NO: 507 - protein, 10 aa, Homo sapiens
ATDIMEAMLK

SEQ ID NO: 508 - protein, 9 aa, Homo sapiens
QSLSYASLK

SEQ ID NO: 509 - protein, 10 aa, Homo sapiens
SSLVIQMAHK

SEQ ID NO: 510 - protein, 11 aa, Homo sapiens
SVMKLCLIMAK

SEQ ID NO: 511 - protein, 9 aa, Homo sapiens
SICPSPGNK

SEQ ID NO: 512 - protein, 9 aa, Homo sapiens
ASANKPNFR

SEQ ID NO: 513 - protein, 9 aa, Homo sapiens
VVLKRVLLR

SEQ ID NO: 514 - protein, 12 aa, Homo sapiens
SVLNWLLSDLQK

SEQ ID NO: 515 - protein, 9 aa, Homo sapiens
FYVNRLSSL

SEQ ID NO: 516 - protein, 10 aa, Homo sapiens
KYALGFQHAL

SEQ ID NO: 517 - protein, 10 aa, Homo sapiens
SQFNVPMLYF

SEQ ID NO: 518 - protein, 10 aa, Homo sapiens
SFYVNRLSSL

SEQ ID NO: 519 - protein, 10 aa, Homo sapiens
FYVNRLSSLV

SEQ ID NO: 520 - protein, 11 aa, Homo sapiens
VYADQVNIDYL

SEQ ID NO: 521 - protein, 9 aa, Homo sapiens
KYSNDGAAL

SEQ ID NO: 522 - protein, 9 aa, Homo sapiens
QFNVPMLYF

SEQ ID NO: 523 - protein, 11 aa, Homo sapiens
NYQDSLGHEVI

SEQ ID NO: 524 - protein, 8 aa, Homo sapiens
VYADQVNI

SEQ ID NO: 525 - protein, 9 aa, Homo sapiens
KSKCLHHSI

SEQ ID NO: 526 - protein, 10 aa, Homo sapiens
RGTRCIHSGA

SEQ ID NO: 527 - protein, 9 aa, Homo sapiens
GTRCIHSGA

SEQ ID NO: 528 - protein, 10 aa, Homo sapiens
KTLKVHSSGK

SEQ ID NO: 529 - protein, 9 aa, Homo sapiens
ASMSNRSDK

SEQ ID NO: 530 - protein, 9 aa, Homo sapiens
KERDKGKMK

SEQ ID NO: 531 - protein, 9 aa, Homo sapiens
GDKDGQLEK

SEQ ID NO: 532 - protein, 9 aa, Homo sapiens
HTKEIVSDL

SEQ ID NO: 533 - protein, 9 aa, Homo sapiens
RQPDEAVGK

SEQ ID NO: 534 - protein, 9 aa, Homo sapiens
KEFADSISK

SEQ ID NO: 535 - protein, 9 aa, Homo sapiens
EVMKFAKER

SEQ ID NO: 536 - protein, 10 aa, Homo sapiens
MMSDDIDWLR

SEQ ID NO: 537 - protein, 9 aa, Homo sapiens
DIDWLRSHR

SEQ ID NO: 538 - protein, 9 aa, Homo sapiens
SVKQLESHR

SEQ ID NO: 539 - protein, 10 aa, Homo sapiens
YLMNRPQNLR

SEQ ID NO: 540 - protein, 9 aa, Homo sapiens
DDLSFYVNR

SEQ ID NO: 541 - protein, 9 aa, Homo sapiens
VNIDYLMNR

SEQ ID NO: 542 - protein, 8 aa, Homo sapiens
EAVGKVAR

SEQ ID NO: 543 - protein, 8 aa, Homo sapiens
DFVSAVKR

SEQ ID NO: 544 - protein, 9 aa, Homo sapiens
RPQNLRLEM

SEQ ID NO: 545 - protein, 9 aa, Homo sapiens
SPRTPASKI

SEQ ID NO: 546 - protein, 9 aa, Homo sapiens
KPIPASVVL

SEQ ID NO: 547 - protein, 9 aa, Homo sapiens
APSDPVSVL

SEQ ID NO: 548 - protein, 10 aa, Homo sapiens
NRPQNLRLEM

SEQ ID NO: 549 - protein, 10 aa, Homo sapiens
TPASKIASEM

SEQ ID NO: 550 - protein, 9 aa, Homo sapiens
MLKRLVSAL

SEQ ID NO: 551 - protein, 9 aa, Homo sapiens
YLMNRPQNL

SEQ ID NO: 552 - protein, 10 aa, Homo sapiens
AMLKRLVSAL

SEQ ID NO: 553 - protein, 12 aa, Homo sapiens
MEAMLKRLVSAL

SEQ ID NO: 554 - protein, 8 aa, Homo sapiens
YVNRLSSL

SEQ ID NO: 555 - protein, 10 aa, Homo sapiens
HDPKCRNQSL

SEQ ID NO: 556 - protein, 9 aa, Homo sapiens
DPKCRNQSL

SEQ ID NO: 557 - protein, 8 aa, Homo sapiens
EHILKEGL

SEQ ID NO: 558 - protein, 8 aa, Homo sapiens
SDLQKYAL

SEQ ID NO: 559 - protein, 8 aa, Homo sapiens
MAYEAVEL

SEQ ID NO: 560 - protein, 11 aa, Homo sapiens
MDMSNIVLMLI

SEQ ID NO: 561 - protein, 10 aa, Homo sapiens
MDMSNIVLML

SEQ ID NO: 562 - protein, 9 aa, Homo sapiens
MSNIVLMLI

SEQ ID NO: 563 - protein, 9 aa, Homo sapiens
MDMSNIVLM

SEQ ID NO: 564 - protein, 12 aa, Homo sapiens
KMDMSNIVLMLI

SEQ ID NO: 565 - protein, 9 aa, Homo sapiens
HILKEGLTI

SEQ ID NO: 566 - protein, 9 aa, Homo sapiens
YQDSLGHEV

SEQ ID NO: 567 - protein, 9 aa, Homo sapiens
GQQDQDRKV

SEQ ID NO: 568 - protein, 9 aa, Homo sapiens
RSHRGVCKV

SEQ ID NO: 569 - protein, 9 aa, Homo sapiens
GQSAKALSV

SEQ ID NO: 570 - protein, 9 aa, Homo sapiens
MAYSDTTMM

SEQ ID NO: 571 - protein, 9 aa, Homo sapiens
MMAYSDTTM

SEQ ID NO: 572 - protein, 9 aa, Homo sapiens
YANQVASDM

SEQ ID NO: 573 - protein, 9 aa, Homo sapiens
CSIDDLSFY

SEQ ID NO: 574 - protein, 9 aa, Homo sapiens
YALGFQHAL

SEQ ID NO: 575 - protein, 9 aa, Homo sapiens
VASDMMVSL

SEQ ID NO: 576 - protein, 9 aa, Homo sapiens
LAKDLIVSA

SEQ ID NO: 577 - protein, 9 aa, Homo sapiens
SGKPIPASV

SEQ ID NO: 578 - protein, 8 aa, Homo sapiens
YSNDGAAL

SEQ ID NO: 579 - protein, 9 aa, Homo sapiens
MMAYSDTTM

SEQ ID NO: 580 - protein, 9 aa, Homo sapiens
YALGFQHAL

SEQ ID NO: 581 - protein, 9 aa, Homo sapiens
YLMNRPQNL

SEQ ID NO: 582 - protein, 9 aa, Homo sapiens
KMDMSNIVL

SEQ ID NO: 583 - protein, 9 aa, Homo sapiens
VASDMMVSL

SEQ ID NO: 584 - protein, 9 aa, Homo sapiens
ISPDGECSI

SEQ ID NO: 585 - protein, 10 aa, Homo sapiens
QAPSDPVSVL

SEQ ID NO: 586 - protein, 9 aa, Homo sapiens
QAPSDPVSV

SEQ ID NO: 587 - protein, 8 aa, Homo sapiens
YSNDGAAL

SEQ ID NO: 588 - protein, 10 aa, Homo sapiens
AMPQNYQDSL

SEQ ID NO: 589 - protein, 9 aa, Homo sapiens
MAYSDTTMM

SEQ ID NO: 590 - protein, 9 aa, Homo sapiens
YALGFQHAL

SEQ ID NO: 591 - protein, 9 aa, Homo sapiens
VASDMMVSL

SEQ ID NO: 592 - protein, 9 aa, Homo sapiens
YANQVASDM

SEQ ID NO: 593 - protein, 9 aa, Homo sapiens
AASQFNVPM

SEQ ID NO: 594 - protein, 8 aa, Homo sapiens
MAYEAVEL

SEQ ID NO: 595 - protein, 9 aa, Homo sapiens
FADSISKGL

SEQ ID NO: 596 - protein, 8 aa, Homo sapiens
YSNDGAAL

SEQ ID NO: 597 - protein, 9 aa, Homo sapiens
YQDSLGHEV

SEQ ID NO: 598 - protein, 9 aa, Homo sapiens
YLMNRPQNL

SEQ ID NO: 599 - protein, 9 aa, Homo sapiens
ASDMMVSLM

SEQ ID NO: 600 - protein, 9 aa, Homo sapiens
FADSISKGL

SEQ ID NO: 601 - protein, 9 aa, Homo sapiens
SIDDLSFYV

SEQ ID NO: 602 - protein, 9 aa, Homo sapiens
KMDMSNIVL

SEQ ID NO: 603 - protein, 9 aa, Homo sapiens
ATDIMEAML

SEQ ID NO: 604 - protein, 9 aa, Homo sapiens
QFNVPMLYF

SEQ ID NO: 605 - protein, 9 aa, Homo sapiens
LLDWLLANL

SEQ ID NO: 606 - protein, 9 aa, Homo sapiens
FVDVSTLNV

SEQ ID NO: 607 - protein, 10 aa, Homo sapiens
KMDMSNIVLM

SEQ ID NO: 608 - protein, 9 aa, Homo sapiens
FYVNRLSSL

SEQ ID NO: 609 - protein, 9 aa, Homo sapiens
YLMNRPQNL

SEQ ID NO: 610 - protein, 9 aa, Homo sapiens
MAYSDTTMM

SEQ ID NO: 611 - protein, 10 aa, Homo sapiens
NRPQNLRLEM

SEQ ID NO: 612 - protein, 9 aa, Homo sapiens
SQFNVPMLY

SEQ ID NO: 613 - protein, 8 aa, Homo sapiens
CRNQSLEF

SEQ ID NO: 614 - protein, 9 aa, Homo sapiens
HRAPGPSTC

SEQ ID NO: 615 - protein, 9 aa, Homo sapiens
SREGGQKSF

SEQ ID NO: 616 - protein, 9 aa, Homo sapiens
HRGVCKVDL

SEQ ID NO: 617 - protein, 9 aa, Homo sapiens
APSDPVSVL

SEQ ID NO: 618 - protein, 9 aa, Homo sapiens
FYVNRLSSL

SEQ ID NO: 619 - protein, 9 aa, Homo sapiens
YLMNRPQNL

SEQ ID NO: 620 - protein, 10 aa, Homo sapiens
SFYVNRLSSL

SEQ ID NO: 621 - protein, 9 aa, Homo sapiens
MAYSDTTMM

SEQ ID NO: 622 - protein, 10 aa, Homo sapiens
NRPQNLRLEM

SEQ ID NO: 623 - protein, 10 aa, Homo sapiens
FYVNRLSSLV

SEQ ID NO: 624 - protein, 9 aa, Homo sapiens
HRAPGPSTC

SEQ ID NO: 625 - protein, 8 aa, Homo sapiens
NRPQNLRL

SEQ ID NO: 626 - protein, 9 aa, Homo sapiens
KYSNDGAAL

SEQ ID NO: 627 - protein, 9 aa, Homo sapiens
MTEAALLLL

SEQ ID NO: 628 - protein, 9 aa, Homo sapiens
FLAMDRFPY

SEQ ID NO: 629 - protein, 10 aa, Homo sapiens
WLAKHQGARY

SEQ ID NO: 630 - protein, 8 aa, Homo sapiens
MTEAALLL

SEQ ID NO: 631 - protein, 9 aa, Homo sapiens
RTELLQASL

SEQ ID NO: 632 - protein, 10 aa, Homo sapiens
FLAMDRFPYV

SEQ ID NO: 633 - protein, 11 aa, Homo sapiens
TFLAMDRFPYV

SEQ ID NO: 634 - protein, 12 aa, Homo sapiens
ETFLAMDRFPYV

SEQ ID NO: 635 - protein, 11 aa, Homo sapiens
FLAMDRFPYVA

SEQ ID NO: 636 - protein, 12 aa, Homo sapiens
FLAMDRFPYVAL

SEQ ID NO: 637 - protein, 12 aa, Homo sapiens
TFLAMDRFPYVA

SEQ ID NO: 638 - protein, 9 aa, Homo sapiens
YVWNRTELL

SEQ ID NO: 639 - protein, 10 aa, Homo sapiens
LLQASLDPSV

SEQ ID NO: 640 - protein, 12 aa, Homo sapiens
SLMEMTEAALLL

SEQ ID NO: 641 - protein, 11 aa, Homo sapiens
SLMEMTEAALL

SEQ ID NO: 642 - protein, 9 aa, Homo sapiens
KLGPETFLA

SEQ ID NO: 643 - protein, 9 aa, Homo sapiens
LLLLGTATA

SEQ ID NO: 644 - protein, 8 aa, Homo sapiens
KLGPETFL

SEQ ID NO: 645 - protein, 8 aa, Homo sapiens
ALSKTYSV

SEQ ID NO: 646 - protein, 10 aa, Homo sapiens
ALSKTYSVDK

SEQ ID NO: 647 - protein, 9 aa, Homo sapiens
GAYAHTVNR

SEQ ID NO: 648 - protein, 10 aa, Homo sapiens
AGAYAHTVNR

SEQ ID NO: 649 - protein, 10 aa, Homo sapiens
KLGPETFLAM

SEQ ID NO: 650 - protein, 10 aa, Homo sapiens
ALLLLSRNPR

SEQ ID NO: 651 - protein, 9 aa, Homo sapiens
GAYAHTVNR

SEQ ID NO: 652 - protein, 10 aa, Homo sapiens
AGAYAHTVNR

SEQ ID NO: 653 - protein, 10 aa, Homo sapiens
ALSKTYSVDK

SEQ ID NO: 654 - protein, 8 aa, Homo sapiens
AALLLLSR

SEQ ID NO: 655 - protein, 9 aa, Homo sapiens
EAALLLLSR

SEQ ID NO: 656 - protein, 10 aa, Homo sapiens
RYVWNRTELL

SEQ ID NO: 657 - protein, 10 aa, Homo sapiens
AYAHTVNRNW

SEQ ID NO: 658 - protein, 11 aa, Homo sapiens
ARYVWNRTELL

SEQ ID NO: 659 - protein, 8 aa, Homo sapiens
VWNRTELL

SEQ ID NO: 660 - protein, 8 aa, Homo sapiens
TFLAMDRF

SEQ ID NO: 661 - protein, 9 aa, Homo sapiens
LSKTYSVDK

SEQ ID NO: 662 - protein, 10 aa, Homo sapiens
RVQHASPAGA

SEQ ID NO: 663 - protein, 9 aa, Homo sapiens
GAYAHTVNR

SEQ ID NO: 664 - protein, 10 aa, Homo sapiens
ALSKTYSVDK

SEQ ID NO: 665 - protein, 9 aa, Homo sapiens
KTYSVDKHV

SEQ ID NO: 666 - protein, 9 aa, Homo sapiens
AAHPGPSVV

SEQ ID NO: 667 - protein, 9 aa, Homo sapiens
YTACDLAPR

SEQ ID NO: 668 - protein, 9 aa, Homo sapiens
LLLLSRNPR

SEQ ID NO: 669 - protein, 9 aa, Homo sapiens
GAYAHTVNR

SEQ ID NO: 670 - protein, 9 aa, Homo sapiens
EAALLLLSR

SEQ ID NO: 671 - protein, 8 aa, Homo sapiens
ETFLAMDR

SEQ ID NO: 672 - protein, 10 aa, Homo sapiens
APRAGTTDAA

SEQ ID NO: 673 - protein, 9 aa, Homo sapiens
APRAGTTDA

SEQ ID NO: 674 - protein, 10 aa, Homo sapiens
HPGPSVVPAL

SEQ ID NO: 675 - protein, 9 aa, Homo sapiens
GPSVVPALL

SEQ ID NO: 676 - protein, 10 aa, Homo sapiens
FLAMDRFPYV

SEQ ID NO: 677 - protein, 12 aa, Homo sapiens
FPYVALSKTYSV

SEQ ID NO: 678 - protein, 9 aa, Homo sapiens
VALSKTYSV

SEQ ID NO: 679 - protein, 9 aa, Homo sapiens
YVWNRTELL

SEQ ID NO: 680 - protein, 8 aa, Homo sapiens
TELLQASL

SEQ ID NO: 681 - protein, 10 aa, Homo sapiens
MEMTEAALLL

SEQ ID NO: 682 - protein, 9 aa, Homo sapiens
MEMTEAALL

SEQ ID NO: 683 - protein, 11 aa, Homo sapiens
MEMTEAALLLL

SEQ ID NO: 684 - protein, 9 aa, Homo sapiens
RQAAEALGA

SEQ ID NO: 685 - protein, 8 aa, Homo sapiens
ALSKTYSV

SEQ ID NO: 686 - protein, 9 aa, Homo sapiens
AAHPGPSVV

SEQ ID NO: 687 - protein, 9 aa, Homo sapiens
FLAMDRFPY

SEQ ID NO: 688 - protein, 10 aa, Homo sapiens
FLAMDRFPYV

SEQ ID NO: 689 - protein, 9 aa, Homo sapiens
YVWNRTELL

SEQ ID NO: 690 - protein, 9 aa, Homo sapiens
AAHPGPSVV

SEQ ID NO: 691 - protein, 8 aa, Homo sapiens
AAHPGPSV

SEQ ID NO: 692 - protein, 9 aa, Homo sapiens
LAKHQGARY

SEQ ID NO: 693 - protein, 9 aa, Homo sapiens
YVWNRTELL

SEQ ID NO: 694 - protein, 9 aa, Homo sapiens
LGPETFLAM

SEQ ID NO: 695 - protein, 9 aa, Homo sapiens
MTEAALLLL

SEQ ID NO: 696 - protein, 9 aa, Homo sapiens
PGPSVVPAL

SEQ ID NO: 697 - protein, 9 aa, Homo sapiens
LAPRAGTTD

SEQ ID NO: 698 - protein, 9 aa, Homo sapiens
AAHPGPSVV

SEQ ID NO: 699 - protein, 9 aa, Homo sapiens
YVWNRTELL

SEQ ID NO: 700 - protein, 10 aa, Homo sapiens
FLAMDRFPYV

SEQ ID NO: 701 - protein, 8 aa, Homo sapiens
AAHPGPSV

SEQ ID NO: 702 - protein, 9 aa, Homo sapiens
DAAHPGPSV

SEQ ID NO: 703 - protein, 9 aa, Homo sapiens
YVWNRTELL

SEQ ID NO: 704 - protein, 10 aa, Homo sapiens
FLAMDRFPYV

SEQ ID NO: 705 - protein, 9 aa, Homo sapiens
MTEAALLLL

SEQ ID NO: 706 - protein, 8 aa, Homo sapiens
VWNRTELL

SEQ ID NO: 707 - protein, 8 aa, Homo sapiens
KLGPETFL

SEQ ID NO: 708 - protein, 9 aa, Homo sapiens
YVWNRTELL

SEQ ID NO: 709 - protein, 10 aa, Homo sapiens
FLAMDRFPYV

SEQ ID NO: 710 - protein, 11 aa, Homo sapiens
ARYVWNRTELL

SEQ ID NO: 711 - protein, 8 aa, Homo sapiens
HPGPSVVP

SEQ ID NO: 712 - protein, 8 aa, Homo sapiens
YSVDKHVP

SEQ ID NO: 713 - protein, 9 aa, Homo sapiens
HPGPSVVPA

SEQ ID NO: 714 - protein, 9 aa, Homo sapiens
YVWNRTELL

SEQ ID NO: 715 - protein, 10 aa, Homo sapiens
RYVWNRTELL

SEQ ID NO: 716 - protein, 10 aa, Homo sapiens
FLAMDRFPYV

SEQ ID NO: 717 - protein, 10 aa, Homo sapiens
NRTELLQASL

SEQ ID NO: 718 - protein, 9 aa, Homo sapiens
LGPETFLAM

SEQ ID NO: 719 - protein, 9 aa, Homo sapiens
PGPSVVPAL

SEQ ID NO: 720 - protein, 11 aa, Homo sapiens
VSPPNENVAIY

SEQ ID NO: 721 - protein, 9 aa, Homo sapiens
NNDDWSFSL

SEQ ID NO: 722 - protein, 10 aa, Homo sapiens
FNNDDWSFSL

SEQ ID NO: 723 - protein, 9 aa, Homo sapiens
LTGLLDLAL

SEQ ID NO: 724 - protein, 10 aa, Homo sapiens
YVDAVINHMC

SEQ ID NO: 725 - protein, 10 aa, Homo sapiens
RLTGLLDLAL

SEQ ID NO: 726 - protein, 12 aa, Homo sapiens
IVFNNDDWSFSL

SEQ ID NO: 727 - protein, 9 aa, Homo sapiens
RLTGLLDLA

SEQ ID NO: 728 - protein, 12 aa, Homo sapiens
YLKNWGEGWGFV

SEQ ID NO: 729 - protein, 11 aa, Homo sapiens
FVPSDRALVFV

SEQ ID NO: 730 - protein, 9 aa, Homo sapiens
FVPSDRALV

SEQ ID NO: 731 - protein, 11 aa, Homo sapiens
AVINHMCGNAV

SEQ ID NO: 732 - protein, 10 aa, Homo sapiens
AVINHMCGNA

SEQ ID NO: 733 - protein, 9 aa, Homo sapiens
NMVIFRNVV

SEQ ID NO: 734 - protein, 9 aa, Homo sapiens
HMCGNAVSA

SEQ ID NO: 735 - protein, 8 aa, Homo sapiens
RLTGLLDL

SEQ ID NO: 736 - protein, 10 aa, Homo sapiens
VPSDRALVFV

SEQ ID NO: 737 - protein, 10 aa, Homo sapiens
FNNDDWSFSL

SEQ ID NO: 738 - protein, 9 aa, Homo sapiens
NNDDWSFSL

SEQ ID NO: 739 - protein, 9 aa, Homo sapiens
NWGEGWGFV

SEQ ID NO: 740 - protein, 10 aa, Homo sapiens
RQIRNMVIFR

SEQ ID NO: 741 - protein, 10 aa, Homo sapiens
TGLLDLALEK

SEQ ID NO: 742 - protein, 12 aa, Homo sapiens
RLTGLLDLALEK

SEQ ID NO: 743 - protein, 9 aa, Homo sapiens
AIYNPFRPW

SEQ ID NO: 744 - protein, 9 aa, Homo sapiens
QIRNMVIFR

SEQ ID NO: 745 - protein, 10 aa, Homo sapiens
AIYNPFRPWW

SEQ ID NO: 746 - protein, 10 aa, Homo sapiens
TGLLDLALEK

SEQ ID NO: 747 - protein, 10 aa, Homo sapiens
RQIRNMVIFR

SEQ ID NO: 748 - protein, 11 aa, Homo sapiens
LTGLLDLALEK

SEQ ID NO: 749 - protein, 12 aa, Homo sapiens
AIYNPFRPWWER

SEQ ID NO: 750 - protein, 9 aa, Homo sapiens
AIYNPFRPW

SEQ ID NO: 751 - protein, 11 aa, Homo sapiens
QVIDLGGEPIK

SEQ ID NO: 752 - protein, 9 aa, Homo sapiens
NVAIYNPFR

SEQ ID NO: 753 - protein, 9 aa, Homo sapiens
IYNPFRPWW

SEQ ID NO: 754 - protein, 9 aa, Homo sapiens
VFNNDDWSF

SEQ ID NO: 755 - protein, 9 aa, Homo sapiens
RQIRNMVIF

SEQ ID NO: 756 - protein, 9 aa, Homo sapiens
NYNDATQVI

SEQ ID NO: 757 - protein, 10 aa, Homo sapiens
RWRQIRNMVI

SEQ ID NO: 758 - protein, 10 aa, Homo sapiens
RQIRNMVIFR

SEQ ID NO: 759 - protein, 9 aa, Homo sapiens
QVRDCRLTG

SEQ ID NO: 760 - protein, 9 aa, Homo sapiens
RNMVIFRNV

SEQ ID NO: 761 - protein, 9 aa, Homo sapiens
AIYNPFRPW

SEQ ID NO: 762 - protein, 9 aa, Homo sapiens
WSFSLTLQT

SEQ ID NO: 763 - protein, 9 aa, Homo sapiens
QIRNMVIFR

SEQ ID NO: 764 - protein, 9 aa, Homo sapiens
NVAIYNPFR

SEQ ID NO: 765 - protein, 10 aa, Homo sapiens
YNPFRPWWER

SEQ ID NO: 766 - protein, 11 aa, Homo sapiens
IYNPFRPWWER

SEQ ID NO: 767 - protein, 9 aa, Homo sapiens
VPSDRALVF

SEQ ID NO: 768 - protein, 10 aa, Homo sapiens
FVPSDRALVF

SEQ ID NO: 769 - protein, 10 aa, Homo sapiens
QVRDCRLTGL

SEQ ID NO: 770 - protein, 8 aa, Homo sapiens
VPSDRALV

SEQ ID NO: 771 - protein, 10 aa, Homo sapiens
VPSDRALVFV

SEQ ID NO: 772 - protein, 9 aa, Homo sapiens
WRQIRNMVI

SEQ ID NO: 773 - protein, 10 aa, Homo sapiens
WRQIRNMVIF

SEQ ID NO: 774 - protein, 10 aa, Homo sapiens
QVRDCRLTGL

SEQ ID NO: 775 - protein, 8 aa, Homo sapiens
DATQVIDL

SEQ ID NO: 776 - protein, 9 aa, Homo sapiens
VPSDRALVF

SEQ ID NO: 777 - protein, 8 aa, Homo sapiens
TGLLDLAL

SEQ ID NO: 778 - protein, 9 aa, Homo sapiens
RNMVIFRNV

SEQ ID NO: 779 - protein, 12 aa, Homo sapiens
FNNDDWSFSLTL

SEQ ID NO: 780 - protein, 10 aa, Homo sapiens
NDDWSFSLTL

SEQ ID NO: 781 - protein, 8 aa, Homo sapiens
RQIRNMVI

SEQ ID NO: 782 - protein, 9 aa, Homo sapiens
RQIRNMVIF

SEQ ID NO: 783 - protein, 8 aa, Homo sapiens
RLTGLLDL

SEQ ID NO: 784 - protein, 10 aa, Homo sapiens
FVPSDRALVF

SEQ ID NO: 785 - protein, 9 aa, Homo sapiens
RQIRNMVIF

SEQ ID NO: 786 - protein, 9 aa, Homo sapiens
AIYNPFRPW

SEQ ID NO: 787 - protein, 9 aa, Homo sapiens
VFNNDDWSF

SEQ ID NO: 788 - protein, 8 aa, Homo sapiens
FNNDDWSF

SEQ ID NO: 789 - protein, 9 aa, Homo sapiens
FVPSDRALV

SEQ ID NO: 790 - protein, 10 aa, Homo sapiens
FVPSDRALVF

SEQ ID NO: 791 - protein, 9 aa, Homo sapiens
LTGLLDLAL

SEQ ID NO: 792 - protein, 8 aa, Homo sapiens
FVPSDRAL

SEQ ID NO: 793 - protein, 10 aa, Homo sapiens
FVPSDRALVF

SEQ ID NO: 794 - protein, 9 aa, Homo sapiens
VPSDRALVF

SEQ ID NO: 795 - protein, 9 aa, Homo sapiens
FVPSDRALV

SEQ ID NO: 796 - protein, 9 aa, Homo sapiens
AIYNPFRPW

SEQ ID NO: 797 - protein, 8 aa, Homo sapiens
FVPSDRAL

SEQ ID NO: 798 - protein, 9 aa, Homo sapiens
GFVPSDRAL

SEQ ID NO: 799 - protein, 9 aa, Homo sapiens
NYNDATQVI

SEQ ID NO: 800 - protein, 10 aa, Homo sapiens
FVPSDRALVF

SEQ ID NO: 801 - protein, 9 aa, Homo sapiens
WRQIRNMVI

SEQ ID NO: 802 - protein, 9 aa, Homo sapiens
VFNNDDWSF

SEQ ID NO: 803 - protein, 9 aa, Homo sapiens
NNDDWSFSL

SEQ ID NO: 804 - protein, 9 aa, Homo sapiens
WRQIRNMVI

SEQ ID NO: 805 - protein, 9 aa, Homo sapiens
CRLTGLLDL

SEQ ID NO: 806 - protein, 9 aa, Homo sapiens
NYNDATQVI

SEQ ID NO: 807 - protein, 9 aa, Homo sapiens
IRNMVIFRN

SEQ ID NO: 808 - protein, 8 aa, Homo sapiens
CRLTGLLD

SEQ ID NO: 809 - protein, 9 aa, Homo sapiens
NNDDWSFSL

SEQ ID NO: 810 - protein, 9 aa, Homo sapiens
WRQIRNMVI

SEQ ID NO: 811 - protein, 9 aa, Homo sapiens
CRLTGLLDL

SEQ ID NO: 812 - protein, 9 aa, Homo sapiens
NYNDATQVI

SEQ ID NO: 813 - protein, 8 aa, Homo sapiens
FVPSDRAL

SEQ ID NO: 814 - protein, 9 aa, Homo sapiens
VPSDRALVF

SEQ ID NO: 815 - protein, 10 aa, Homo sapiens
MNVDVSSTIY

SEQ ID NO: 816 - protein, 9 aa, Homo sapiens
NVDVSSTIY

SEQ ID NO: 817 - protein, 12 aa, Homo sapiens
LVDVYGNTALHY

SEQ ID NO: 818 - protein, 11 aa, Homo sapiens
KMNVDVSSTIY

SEQ ID NO: 819 - protein, 10 aa, Homo sapiens
GADINLVDVY

SEQ ID NO: 820 - protein, 12 aa, Homo sapiens
RKMNVDVSSTIY

SEQ ID NO: 821 - protein, 9 aa, Homo sapiens
PSESKQKDY

SEQ ID NO: 822 - protein, 9 aa, Homo sapiens
TIDIHFLER

SEQ ID NO: 823 - protein, 9 aa, Homo sapiens
YSCDSRSLF

SEQ ID NO: 824 - protein, 9 aa, Homo sapiens
YLLHENCML

SEQ ID NO: 825 - protein, 9 aa, Homo sapiens
AVYSEILSV

SEQ ID NO: 826 - protein, 9 aa, Homo sapiens
SLSKILDTV

SEQ ID NO: 827 - protein, 9 aa, Homo sapiens
SLDQKLFQL

SEQ ID NO: 828 - protein, 9 aa, Homo sapiens
SLTPLLLSI

SEQ ID NO: 829 - protein, 10 aa, Homo sapiens
YAVYSEILSV

SEQ ID NO: 830 - protein, 9 aa, Homo sapiens
NMWLQQQLV

SEQ ID NO: 831 - protein, 10 aa, Homo sapiens
LLSHGAVIEV

SEQ ID NO: 832 - protein, 9 aa, Homo sapiens
SLFESSAKI

SEQ ID NO: 833 - protein, 11 aa, Homo sapiens
KLLSHGAVIEV

SEQ ID NO: 834 - protein, 10 aa, Homo sapiens
FLKAPCRMKV

SEQ ID NO: 835 - protein, 9 aa, Homo sapiens
FLLIKNANA

SEQ ID NO: 836 - protein, 10 aa, Homo sapiens
AVYSEILSVV

SEQ ID NO: 837 - protein, 10 aa, Homo sapiens
ASLTPLLLSI

SEQ ID NO: 838 - protein, 12 aa, Homo sapiens
ILIDSGADINLV

SEQ ID NO: 839 - protein, 9 aa, Homo sapiens
VLIAENTML

SEQ ID NO: 840 - protein, 11 aa, Homo sapiens
ILIDSGADINL

SEQ ID NO: 841 - protein, 11 aa, Homo sapiens
SLFESSAKIQV

SEQ ID NO: 842 - protein, 9 aa, Homo sapiens
ILKEKNAEL

SEQ ID NO: 843 - protein, 9 aa, Homo sapiens
ILIDSGADI

SEQ ID NO: 844 - protein, 10 aa, Homo sapiens
ILNEKIREEL

SEQ ID NO: 845 - protein, 10 aa, Homo sapiens
IMEYIRKLSK

SEQ ID NO: 846 - protein, 10 aa, Homo sapiens
KMQHHLLKEK

SEQ ID NO: 847 - protein, 9 aa, Homo sapiens
RMKVSIPTK

SEQ ID NO: 848 - protein, 10 aa, Homo sapiens
LELMDMQTFK

SEQ ID NO: 849 - protein, 10 aa, Homo sapiens
LLHENCMLKK

SEQ ID NO: 850 - protein, 12 aa, Homo sapiens
KALELMDMQTFK

SEQ ID NO: 851 - protein, 9 aa, Homo sapiens
KVLEKGRSK

SEQ ID NO: 852 - protein, 9 aa, Homo sapiens
ELMDMQTFK

SEQ ID NO: 853 - protein, 9 aa, Homo sapiens
SLCETVSQK

SEQ ID NO: 854 - protein, 9 aa, Homo sapiens
RIYQYEKEK

SEQ ID NO: 855 - protein, 10 aa, Homo sapiens
KLEDSTSLSK

SEQ ID NO: 856 - protein, 12 aa, Homo sapiens
AVYSEILSVVAK

SEQ ID NO: 857 - protein, 9 aa, Homo sapiens
CVARVTSNK

SEQ ID NO: 858 - protein, 9 aa, Homo sapiens
RSLFESSAK

SEQ ID NO: 859 - protein, 10 aa, Homo sapiens
LELMDMQTFK

SEQ ID NO: 860 - protein, 10 aa, Homo sapiens
SVPNKAFELK

SEQ ID NO: 861 - protein, 10 aa, Homo sapiens
ATLKHQYQEK

SEQ ID NO: 862 - protein, 11 aa, Homo sapiens
ITIDIHFLERK

SEQ ID NO: 863 - protein, 10 aa, Homo sapiens
VCIPESIYQK

SEQ ID NO: 864 - protein, 10 aa, Homo sapiens
ITIDIHFLER

SEQ ID NO: 865 - protein, 8 aa, Homo sapiens
AVIEVHNK

SEQ ID NO: 866 - protein, 11 aa, Homo sapiens
QVCIPESIYQK

SEQ ID NO: 867 - protein, 12 aa, Homo sapiens
AVYSEILSVVAK

SEQ ID NO: 868 - protein, 9 aa, Homo sapiens
CIPESIYQK

SEQ ID NO: 869 - protein, 9 aa, Homo sapiens
KYKCTALML

SEQ ID NO: 870 - protein, 9 aa, Homo sapiens
VYSEILSVV

SEQ ID NO: 871 - protein, 9 aa, Homo sapiens
HYAVYSEIL

SEQ ID NO: 872 - protein, 8 aa, Homo sapiens
IYQKVMEI

SEQ ID NO: 873 - protein, 10 aa, Homo sapiens
QYSGQLKVLI

SEQ ID NO: 874 - protein, 11 aa, Homo sapiens
HYAVTCGFHHI

SEQ ID NO: 875 - protein, 10 aa, Homo sapiens
QYQEKENKYF

SEQ ID NO: 876 - protein, 10 aa, Homo sapiens
EYSCDSRSLF

SEQ ID NO: 877 - protein, 9 aa, Homo sapiens
QYSGQLKVL

SEQ ID NO: 878 - protein, 9 aa, Homo sapiens
RMKVSIPTK

SEQ ID NO: 879 - protein, 10 aa, Homo sapiens
RSKMIACPTK

SEQ ID NO: 880 - protein, 9 aa, Homo sapiens
GMKVSIPTK

SEQ ID NO: 881 - protein, 9 aa, Homo sapiens
RSKMIACPT

SEQ ID NO: 882 - protein, 9 aa, Homo sapiens
AQRKSKSLK

SEQ ID NO: 883 - protein, 9 aa, Homo sapiens
KSKSLKINL

SEQ ID NO: 884 - protein, 9 aa, Homo sapiens
KLKEESLTK

SEQ ID NO: 885 - protein, 9 aa, Homo sapiens
SQKDVCLPK

SEQ ID NO: 886 - protein, 9 aa, Homo sapiens
SQKDVCVPK

SEQ ID NO: 887 - protein, 9 aa, Homo sapiens
SLRETVSQK

SEQ ID NO: 888 - protein, 9 aa, Homo sapiens
KVLEKGRSK

SEQ ID NO: 889 - protein, 10 aa, Homo sapiens
ITIDIHFLER

SEQ ID NO: 890 - protein, 10 aa, Homo sapiens
FTWAAKGRPR

SEQ ID NO: 891 - protein, 10 aa, Homo sapiens
FTWPAKGRPR

SEQ ID NO: 892 - protein, 9 aa, Homo sapiens
NSWDSESLR

SEQ ID NO: 893 - protein, 9 aa, Homo sapiens
TVHSCERAR

SEQ ID NO: 894 - protein, 10 aa, Homo sapiens
NTLVSEHAQR

SEQ ID NO: 895 - protein, 9 aa, Homo sapiens
NYNNHLKNR

SEQ ID NO: 896 - protein, 9 aa, Homo sapiens
DEAAPLVER

SEQ ID NO: 897 - protein, 8 aa, Homo sapiens
EAAPLVER

SEQ ID NO: 898 - protein, 11 aa, Homo sapiens
IFNYNNHLKNR

SEQ ID NO: 899 - protein, 10 aa, Homo sapiens
FNYNNHLKNR

SEQ ID NO: 900 - protein, 9 aa, Homo sapiens
TPREITSPA

SEQ ID NO: 901 - protein, 9 aa, Homo sapiens
KPSAFKPAI

SEQ ID NO: 902 - protein, 8 aa, Homo sapiens
HPRLASAV

SEQ ID NO: 903 - protein, 9 aa, Homo sapiens
TPREIMSPA

SEQ ID NO: 904 - protein, 10 aa, Homo sapiens
WPAKGRPRKI

SEQ ID NO: 905 - protein, 10 aa, Homo sapiens
VPKATHQKEM

SEQ ID NO: 906 - protein, 9 aa, Homo sapiens
KPSAFEPAI

SEQ ID NO: 907 - protein, 8 aa, Homo sapiens
TPDEAASL

SEQ ID NO: 908 - protein, 8 aa, Homo sapiens
VPNKALEL

SEQ ID NO: 909 - protein, 9 aa, Homo sapiens
EPPGKPSAF

SEQ ID NO: 910 - protein, 9 aa, Homo sapiens
QMKKKFCVL

SEQ ID NO: 911 - protein, 11 aa, Homo sapiens
MEQMKKKFCVL

SEQ ID NO: 912 - protein, 12 aa, Homo sapiens
KMEQMKKKFCVL

SEQ ID NO: 913 - protein, 8 aa, Homo sapiens
MKKKFCVL

SEQ ID NO: 914 - protein, 10 aa, Homo sapiens
EQMKKKFCVL

SEQ ID NO: 915 - protein, 9 aa, Homo sapiens
MLKLEIATL

SEQ ID NO: 916 - protein, 12 aa, Homo sapiens
MEQMKKKFCVLK

SEQ ID NO: 917 - protein, 9 aa, Homo sapiens
TLKLKEESL

SEQ ID NO: 918 - protein, 9 aa, Homo sapiens
ILKEKNAEL

SEQ ID NO: 919 - protein, 9 aa, Homo sapiens
VNKYKCTAL

SEQ ID NO: 920 - protein, 8 aa, Homo sapiens
EVHNKASL

SEQ ID NO: 921 - protein, 9 aa, Homo sapiens
EAQRKSKSL

SEQ ID NO: 922 - protein, 10 aa, Homo sapiens
SEQIVEFLLI

SEQ ID NO: 923 - protein, 10 aa, Homo sapiens
KEIAMLKLEI

SEQ ID NO: 924 - protein, 9 aa, Homo sapiens
QEACANILI

SEQ ID NO: 925 - protein, 9 aa, Homo sapiens
HEEVVTFLV

SEQ ID NO: 926 - protein, 10 aa, Homo sapiens
HQEACANILI

SEQ ID NO: 927 - protein, 9 aa, Homo sapiens
SQYSGQLKV

SEQ ID NO: 928 - protein, 9 aa, Homo sapiens
EQIVEFLLI

SEQ ID NO: 929 - protein, 9 aa, Homo sapiens
AVYSEILSV

SEQ ID NO: 930 - protein, 9 aa, Homo sapiens
EQHRKELEV

SEQ ID NO: 931 - protein, 9 aa, Homo sapiens
KQDKEILEA

SEQ ID NO: 932 - protein, 8 aa, Homo sapiens
SQLENQKV

SEQ ID NO: 933 - protein, 9 aa, Homo sapiens
SAFEPATEM

SEQ ID NO: 934 - protein, 9 aa, Homo sapiens
SAFEPAIEM

SEQ ID NO: 935 - protein, 9 aa, Homo sapiens
YSCDSRSLF

SEQ ID NO: 936 - protein, 9 aa, Homo sapiens
HIHEQIMEY

SEQ ID NO: 937 - protein, 9 aa, Homo sapiens
SAFKPAIEM

SEQ ID NO: 938 - protein, 10 aa, Homo sapiens
YAVYSEILSV

SEQ ID NO: 939 - protein, 9 aa, Homo sapiens
ILKEKNAEL

SEQ ID NO: 940 - protein, 9 aa, Homo sapiens
HLKNRIYQY

SEQ ID NO: 941 - protein, 9 aa, Homo sapiens
SVPNKALEL

SEQ ID NO: 942 - protein, 9 aa, Homo sapiens
SIPTKALEL

SEQ ID NO: 943 - protein, 9 aa, Homo sapiens
SVPNKAFEL

SEQ ID NO: 944 - protein, 9 aa, Homo sapiens
KTPDEAASL

SEQ ID NO: 945 - protein, 9 aa, Homo sapiens
KTPDEAAPL

SEQ ID NO: 946 - protein, 9 aa, Homo sapiens
SAFEPAIEM

SEQ ID NO: 947 - protein, 9 aa, Homo sapiens
HSCERAREL

SEQ ID NO: 948 - protein, 9 aa, Homo sapiens
SAFEPATEM

SEQ ID NO: 949 - protein, 9 aa, Homo sapiens
SAFEPAIEM

SEQ ID NO: 950 - protein, 9 aa, Homo sapiens
SAFKPAIEM

SEQ ID NO: 951 - protein, 9 aa, Homo sapiens
RASQYSGQL

SEQ ID NO: 952 - protein, 9 aa, Homo sapiens
STIYNNEVL

SEQ ID NO: 953 - protein, 10 aa, Homo sapiens
YAVYSEILSV

SEQ ID NO: 954 - protein, 10 aa, Homo sapiens
VSIPTKALEL

SEQ ID NO: 955 - protein, 8 aa, Homo sapiens
VSIPTKAL

SEQ ID NO: 956 - protein, 8 aa, Homo sapiens
YSCDSRSL

SEQ ID NO: 957 - protein, 9 aa, Homo sapiens
HQEACANIL

SEQ ID NO: 958 - protein, 9 aa, Homo sapiens
GHEEVVTFL

SEQ ID NO: 959 - protein, 9 aa, Homo sapiens
YFEDIKILK

SEQ ID NO: 960 - protein, 9 aa, Homo sapiens
FHIAGDACL

SEQ ID NO: 961 - protein, 9 aa, Homo sapiens
SVPNKAFEL

SEQ ID NO: 962 - protein, 9 aa, Homo sapiens
HYAVYSEIL

SEQ ID NO: 963 - protein, 8 aa, Homo sapiens
AFEPAIEM

SEQ ID NO: 964 - protein, 8 aa, Homo sapiens
AFEPATEM

SEQ ID NO: 965 - protein, 8 aa, Homo sapiens
IFNYNNHL

SEQ ID NO: 966 - protein, 8 aa, Homo sapiens
TPDEAASL

SEQ ID NO: 967 - protein, 8 aa, Homo sapiens
SWDTESLC

SEQ ID NO: 968 - protein, 8 aa, Homo sapiens
SWDSESLC

SEQ ID NO: 969 - protein, 9 aa, Homo sapiens
HRTPLMKAL

SEQ ID NO: 970 - protein, 9 aa, Homo sapiens
SIYQKVMEI

SEQ ID NO: 971 - protein, 9 aa, Homo sapiens
KRSEQIVEF

SEQ ID NO: 972 - protein, 9 aa, Homo sapiens
FHHIHEQIM

SEQ ID NO: 973 - protein, 9 aa, Homo sapiens
ERKMQHHLL

SEQ ID NO: 974 - protein, 9 aa, Homo sapiens
NKYKCTALM

SEQ ID NO: 975 - protein, 9 aa, Homo sapiens
RRNADILNE

SEQ ID NO: 976 - protein, 8 aa, Homo sapiens
KRSEQIVE

SEQ ID NO: 977 - protein, 9 aa, Homo sapiens
CGFHHIHEQ

SEQ ID NO: 978 - protein, 8 aa, Homo sapiens
RSEQIVEF

SEQ ID NO: 979 - protein, 9 aa, Homo sapiens
HIHEQIMEY

SEQ ID NO: 980 - protein, 9 aa, Homo sapiens
HRTPLMKAL

SEQ ID NO: 981 - protein, 9 aa, Homo sapiens
KRSEQIVEF

SEQ ID NO: 982 - protein, 9 aa, Homo sapiens
HYAVYSEIL

SEQ ID NO: 983 - protein, 9 aa, Homo sapiens
FHHIHEQIM

SEQ ID NO: 984 - protein, 9 aa, Homo sapiens
KYKCTALML

SEQ ID NO: 985 - protein, 9 aa, Homo sapiens
SIYQKVMEI

SEQ ID NO: 986 - protein, 9 aa, Homo sapiens
FHIAGDACL

SEQ ID NO: 987 - protein, 9 aa, Homo sapiens
HIHEQIMEY

SEQ ID NO: 988 - protein, 9 aa, Homo sapiens
KTPDEAASL

SEQ ID NO: 989 - protein, 9 aa, Homo sapiens
CSGHTLLEY

SEQ ID NO: 990 - protein, 11 aa, Homo sapiens
FACSGHTLLEY

SEQ ID NO: 991 - protein, 9 aa, Homo sapiens
HLFQRNLFY

SEQ ID NO: 992 - protein, 9 aa, Homo sapiens
LSDLHLLQS

SEQ ID NO: 993 - protein, 8 aa, Homo sapiens
LSDLHLLQ

SEQ ID NO: 994 - protein, 8 aa, Homo sapiens
LLEYVQVY

SEQ ID NO: 995 - protein, 9 aa, Homo sapiens
FLLFLAHGV

SEQ ID NO: 996 - protein, 10 aa, Homo sapiens
LMRLCWAWEL

SEQ ID NO: 997 - protein, 9 aa, Homo sapiens
LLLTLLFLL

SEQ ID NO: 998 - protein, 10 aa, Homo sapiens
ALLPVGAYEV

SEQ ID NO: 999 - protein, 9 aa, Homo sapiens
LLPVGAYEV

SEQ ID NO: 1000 - protein, 10 aa, Homo sapiens
LFLLFLAHGV

SEQ ID NO: 1001 - protein, 10 aa, Homo sapiens
FLLFLAHGVT

SEQ ID NO: 1002 - protein, 11 aa, Homo sapiens
TLMRLCWAWEL

SEQ ID NO: 1003 - protein, 10 aa, Homo sapiens
SLSFFFATFA

SEQ ID NO: 1004 - protein, 9 aa, Homo sapiens
FTSAFFNPA

SEQ ID NO: 1005 - protein, 11 aa, Homo sapiens
TLLEYVQVYWL

SEQ ID NO: 1006 - protein, 9 aa, Homo sapiens
SLPGTLLKL

SEQ ID NO: 1007 - protein, 8 aa, Homo sapiens
TLLEYVQV

SEQ ID NO: 1008 - protein, 9 aa, Homo sapiens
ALAASVTFA

SEQ ID NO: 1009 - protein, 9 aa, Homo sapiens
TLVELGPWA

SEQ ID NO: 1010 - protein, 8 aa, Homo sapiens
FLAHGVTL

SEQ ID NO: 1011 - protein, 9 aa, Homo sapiens
HLFQRNLFY

SEQ ID NO: 1012 - protein, 10 aa, Homo sapiens
RNLFYGQKNK

SEQ ID NO: 1013 - protein, 12 aa, Homo sapiens
HLFQRNLFYGQK

SEQ ID NO: 1014 - protein, 9 aa, Homo sapiens
ALLVTVTAY

SEQ ID NO: 1015 - protein, 9 aa, Homo sapiens
QSLPGTLLK

SEQ ID NO: 1016 - protein, 9 aa, Homo sapiens
QSLPGTLLK

SEQ ID NO: 1017 - protein, 12 aa, Homo sapiens
MAEQSLPGTLLK

SEQ ID NO: 1018 - protein, 9 aa, Homo sapiens
HLFQRNLFY

SEQ ID NO: 1019 - protein, 10 aa, Homo sapiens
ATFALCEAAR

SEQ ID NO: 1020 - protein, 9 aa, Homo sapiens
GRLPHLFQR

SEQ ID NO: 1021 - protein, 12 aa, Homo sapiens
AYTAGPFTSAFF

SEQ ID NO: 1022 - protein, 9 aa, Homo sapiens
SLSFFFATF

SEQ ID NO: 1023 - protein, 9 aa, Homo sapiens
SFFFATFAL

SEQ ID NO: 1024 - protein, 10 aa, Homo sapiens
AYSGPAVALL

SEQ ID NO: 1025 - protein, 9 aa, Homo sapiens
AYSGPAVAL

SEQ ID NO: 1026 - protein, 9 aa, Homo sapiens
LLTLLFLLF

SEQ ID NO: 1027 - protein, 10 aa, Homo sapiens
KYRAPRGKPA

SEQ ID NO: 1028 - protein, 10 aa, Homo sapiens
ASKALLPVGA

SEQ ID NO: 1029 - protein, 10 aa, Homo sapiens
RAPRGKPAPA

SEQ ID NO: 1030 - protein, 10 aa, Homo sapiens
KNKYRAPRGK

SEQ ID NO: 1031 - protein, 9 aa, Homo sapiens
HTLLEYVQV

SEQ ID NO: 1032 - protein, 10 aa, Homo sapiens
SVREPGRSGV

SEQ ID NO: 1033 - protein, 9 aa, Homo sapiens
EVFAREAMR

SEQ ID NO: 1034 - protein, 10 aa, Homo sapiens
YEVFAREAMR

SEQ ID NO: 1035 - protein, 9 aa, Homo sapiens
TFALCEAAR

SEQ ID NO: 1036 - protein, 10 aa, Homo sapiens
LFYGQKNKYR

SEQ ID NO: 1037 - protein, 10 aa, Homo sapiens
MAQSCSSALR

SEQ ID NO: 1038 - protein, 9 aa, Homo sapiens
FYGQKNKYR

SEQ ID NO: 1039 - protein, 9 aa, Homo sapiens
AARRASKAL

SEQ ID NO: 1040 - protein, 9 aa, Homo sapiens
APRGKPAPA

SEQ ID NO: 1041 - protein, 10 aa, Homo sapiens
RAPRGKPAPA

SEQ ID NO: 1042 - protein, 9 aa, Homo sapiens
GPDLLLTLL

SEQ ID NO: 1043 - protein, 9 aa, Homo sapiens
AYSGPAVAL

SEQ ID NO: 1044 - protein, 10 aa, Homo sapiens
LLHLRHSPPA

SEQ ID NO: 1045 - protein, 9 aa, Homo sapiens
LLHLRHSPP

SEQ ID NO: 1046 - protein, 10 aa, Homo sapiens
LMRLCWAWEL

SEQ ID NO: 1047 - protein, 10 aa, Homo sapiens
LLHQGRLPHL

SEQ ID NO: 1048 - protein, 8 aa, Homo sapiens
DLHLLQSL

SEQ ID NO: 1049 - protein, 8 aa, Homo sapiens
SANPTVSL

SEQ ID NO: 1050 - protein, 8 aa, Homo sapiens
EMRTLVEL

SEQ ID NO: 1051 - protein, 9 aa, Homo sapiens
LEMRTLVEL

SEQ ID NO: 1052 - protein, 9 aa, Homo sapiens
WELSDLHLL

SEQ ID NO: 1053 - protein, 9 aa, Homo sapiens
LEYVQVYWL

SEQ ID NO: 1054 - protein, 9 aa, Homo sapiens
SLPGTLLKL

SEQ ID NO: 1055 - protein, 9 aa, Homo sapiens
RLPHLFQRN

SEQ ID NO: 1056 - protein, 10 aa, Homo sapiens
ALLPVGAYEV

SEQ ID NO: 1057 - protein, 10 aa, Homo sapiens
YTAGPFTSAF

SEQ ID NO: 1058 - protein, 9 aa, Homo sapiens
FAREAMRTL

SEQ ID NO: 1059 - protein, 9 aa, Homo sapiens
FAREAVGAV

SEQ ID NO: 1060 - protein, 9 aa, Homo sapiens
TAGPFTSAF

SEQ ID NO: 1061 - protein, 9 aa, Homo sapiens
ASANPTVSL

SEQ ID NO: 1062 - protein, 8 aa, Homo sapiens
SANPTVSL

SEQ ID NO: 1063 - protein, 9 aa, Homo sapiens
YSGPAVALL

SEQ ID NO: 1064 - protein, 9 aa, Homo sapiens
MAQSCSSAL

SEQ ID NO: 1065 - protein, 9 aa, Homo sapiens
FGPDLLLTL

SEQ ID NO: 1066 - protein, 9 aa, Homo sapiens
LGPLTGMVL

SEQ ID NO: 1067 - protein, 9 aa, Homo sapiens
SLPGTLLKL

SEQ ID NO: 1068 - protein, 9 aa, Homo sapiens
MAQSCSSAL

SEQ ID NO: 1069 - protein, 9 aa, Homo sapiens
FAREAMRTL

SEQ ID NO: 1070 - protein, 9 aa, Homo sapiens
FACSGHTLL

SEQ ID NO: 1071 - protein, 8 aa, Homo sapiens
FACSGHTL

SEQ ID NO: 1072 - protein, 9 aa, Homo sapiens
MAQSCSSAL

SEQ ID NO: 1073 - protein, 9 aa, Homo sapiens
AYSGPAVAL

SEQ ID NO: 1074 - protein, 9 aa, Homo sapiens
MRLCWAWEL

SEQ ID NO: 1075 - protein, 10 aa, Homo sapiens
FFNPALAASV

SEQ ID NO: 1076 - protein, 9 aa, Homo sapiens
AFCFHLTLL

SEQ ID NO: 1077 - protein, 9 aa, Homo sapiens
CFHLTLLHL

SEQ ID NO: 1078 - protein, 9 aa, Homo sapiens
MRLCWAWEL

SEQ ID NO: 1079 - protein, 9 aa, Homo sapiens
FAREAMRTL

SEQ ID NO: 1080 - protein, 9 aa, Homo sapiens
YRAPRGKPA

SEQ ID NO: 1081 - protein, 9 aa, Homo sapiens
TLLEYVQVY

SEQ ID NO: 1082 - protein, 9 aa, Homo sapiens
CSGHTLLEY

SEQ ID NO: 1083 - protein, 9 aa, Homo sapiens
MRLCWAWEL

SEQ ID NO: 1084 - protein, 9 aa, Homo sapiens
FAREAMRTL

SEQ ID NO: 1085 - protein, 9 aa, Homo sapiens
SFFFATFAL

SEQ ID NO: 1086 - protein, 9 aa, Homo sapiens
AYSGPAVAL

SEQ ID NO: 1087 - protein, 9 aa, Homo sapiens
FGPDLLLTL

SEQ ID NO: 1088 - protein, 10 aa, Homo sapiens
FLEMRTLVEL

SEQ ID NO: 1089 - protein, 10 aa, Homo sapiens
LTRLCWAWEL

SEQ ID NO: 1090 - protein, 9 aa, Homo sapiens
FATFTLCEA

SEQ ID NO: 1091 - protein, 9 aa, Homo sapiens
CTLTRLCWA

SEQ ID NO: 1092 - protein, 8 aa, Homo sapiens
FLEMRTLV

SEQ ID NO: 1093 - protein, 9 aa, Homo sapiens
ESLPGTLLK

SEQ ID NO: 1094 - protein, 9 aa, Homo sapiens
FLEMRTLVE

SEQ ID NO: 1095 - protein, 10 aa, Homo sapiens
FLEMRTLVEL

SEQ ID NO: 1096 - protein, 11 aa, Homo sapiens
FLMAEESLPGT

SEQ ID NO: 1097 - protein, 11 aa, Homo sapiens
CFLEMRTLVEL

SEQ ID NO: 1098 - protein, 9 aa, Homo sapiens
RLHPDAPLL

SEQ ID NO: 1099 - protein, 12 aa, Homo sapiens
ACFLEMRTLVEL

SEQ ID NO: 1100 - protein, 11 aa, Homo sapiens
FLEMRTLVELG

SEQ ID NO: 1101 - protein, 11 aa, Homo sapiens
TLTRLCWAWEL

SEQ ID NO: 1102 - protein, 8 aa, Homo sapiens
FLMAEESL

SEQ ID NO: 1103 - protein, 12 aa, Homo sapiens
EFLMAEESLPGT

SEQ ID NO: 1104 - protein, 11 aa, Homo sapiens
RLHPDAPLLGL

SEQ ID NO: 1105 - protein, 9 aa, Homo sapiens
TLCEAARRA

SEQ ID NO: 1106 - protein, 9 aa, Homo sapiens
FLMAEESLP

SEQ ID NO: 1107 - protein, 8 aa, Homo sapiens
FLEMRTLV

SEQ ID NO: 1108 - protein, 11 aa, Homo sapiens
SLSFFFATFTL

SEQ ID NO: 1109 - protein, 10 aa, Homo sapiens
GMQAACTLTR

SEQ ID NO: 1110 - protein, 12 aa, Homo sapiens
MAEESLPGTLLK

SEQ ID NO: 1111 - protein, 11 aa, Homo sapiens
TLCEAARRASK

SEQ ID NO: 1112 - protein, 11 aa, Homo sapiens
AEESLPGTLLK

SEQ ID NO: 1113 - protein, 9 aa, Homo sapiens
ESLPGTLLK

SEQ ID NO: 1114 - protein, 11 aa, Homo sapiens
RLHPDAPLLGL

SEQ ID NO: 1115 - protein, 10 aa, Homo sapiens
RLHPDAPLLG

SEQ ID NO: 1116 - protein, 9 aa, Homo sapiens
ESLPGTLLK

SEQ ID NO: 1117 - protein, 12 aa, Homo sapiens
MAEESLPGTLLK

SEQ ID NO: 1118 - protein, 11 aa, Homo sapiens
AEESLPGTLLK

SEQ ID NO: 1119 - protein, 10 aa, Homo sapiens
ATFTLCEAAR

SEQ ID NO: 1120 - protein, 9 aa, Homo sapiens
GTGAGHAGR

SEQ ID NO: 1121 - protein, 9 aa, Homo sapiens
SFFFATFTL

SEQ ID NO: 1122 - protein, 10 aa, Homo sapiens
LSFFFATFTL

SEQ ID NO: 1123 - protein, 11 aa, Homo sapiens
SLSFFFATFTL

SEQ ID NO: 1124 - protein, 9 aa, Homo sapiens
RLHPDAPLL

SEQ ID NO: 1125 - protein, 8 aa, Homo sapiens
FFFATFTL

SEQ ID NO: 1126 - protein, 9 aa, Homo sapiens
RGVSAWHAA

SEQ ID NO: 1127 - protein, 10 aa, Homo sapiens
HGRGVSAWHA

SEQ ID NO: 1128 - protein, 9 aa, Homo sapiens
CTLTRLCWA

SEQ ID NO: 1129 - protein, 9 aa, Homo sapiens
RLHPDAPLL

SEQ ID NO: 1130 - protein, 9 aa, Homo sapiens
ESLPGTLLK

SEQ ID NO: 1131 - protein, 9 aa, Homo sapiens
ACFLEMRTL

SEQ ID NO: 1132 - protein, 9 aa, Homo sapiens
TFTLCEAAR

SEQ ID NO: 1133 - protein, 10 aa, Homo sapiens
ATFTLCEAAR

SEQ ID NO: 1134 - protein, 9 aa, Homo sapiens
FTLCEAARR

SEQ ID NO: 1135 - protein, 9 aa, Homo sapiens
ESLPGTLLK

SEQ ID NO: 1136 - protein, 9 aa, Homo sapiens
VPHGRGVSA

SEQ ID NO: 1137 - protein, 9 aa, Homo sapiens
HPDAPLLGL

SEQ ID NO: 1138 - protein, 10 aa, Homo sapiens
GVPHGRGVSA

SEQ ID NO: 1139 - protein, 10 aa, Homo sapiens
VPHGRGVSAW

SEQ ID NO: 1140 - protein, 10 aa, Homo sapiens
FLEMRTLVEL

SEQ ID NO: 1141 - protein, 9 aa, Homo sapiens
VPHGRGVSA

SEQ ID NO: 1142 - protein, 8 aa, Homo sapiens
FLEMRTLV

SEQ ID NO: 1143 - protein, 8 aa, Homo sapiens
ESLPGTLL

SEQ ID NO: 1144 - protein, 10 aa, Homo sapiens
LSFFFATFTL

SEQ ID NO: 1145 - protein, 10 aa, Homo sapiens
FLEMRTLVEL

SEQ ID NO: 1146 - protein, 10 aa, Homo sapiens
MQAACTLTRL

SEQ ID NO: 1147 - protein, 9 aa, Homo sapiens
RLHPDAPLL

SEQ ID NO: 1148 - protein, 9 aa, Homo sapiens
AVGAVQLGA

SEQ ID NO: 1149 - protein, 9 aa, Homo sapiens
HPDAPLLGL

SEQ ID NO: 1150 - protein, 9 aa, Homo sapiens
GAVQLGACF

SEQ ID NO: 1151 - protein, 9 aa, Homo sapiens
FATFTLCEA

SEQ ID NO: 1152 - protein, 10 aa, Homo sapiens
MQAACTLTRL

SEQ ID NO: 1153 - protein, 9 aa, Homo sapiens
VSAWHAAEA

SEQ ID NO: 1154 - protein, 9 aa, Homo sapiens
VPHGRGVSA

SEQ ID NO: 1155 - protein, 9 aa, Homo sapiens
HAAEAGGTG

SEQ ID NO: 1156 - protein, 9 aa, Homo sapiens
RLHPDAPLL

SEQ ID NO: 1157 - protein, 9 aa, Homo sapiens
SFFFATFTL

SEQ ID NO: 1158 - protein, 10 aa, Homo sapiens
FLEMRTLVEL

SEQ ID NO: 1159 - protein, 10 aa, Homo sapiens
LHPDAPLLGL

SEQ ID NO: 1160 - protein, 8 aa, Homo sapiens
RLHPDAPL

SEQ ID NO: 1161 - protein, 9 aa, Homo sapiens
FATFTLCEA

SEQ ID NO: 1162 - protein, 9 aa, Homo sapiens
QAACTLTRL

SEQ ID NO: 1163 - protein, 10 aa, Homo sapiens
MQAACTLTRL

SEQ ID NO: 1164 - protein, 8 aa, Homo sapiens
FFFATFTL

SEQ ID NO: 1165 - protein, 8 aa, Homo sapiens
ESLPGTLL

SEQ ID NO: 1166 - protein, 8 aa, Homo sapiens
FLMAEESL

SEQ ID NO: 1167 - protein, 9 aa, Homo sapiens
RLHPDAPLL

SEQ ID NO: 1168 - protein, 9 aa, Homo sapiens
TRLCWAWEL

SEQ ID NO: 1169 - protein, 10 aa, Homo sapiens
LHPDAPLLGL

SEQ ID NO: 1170 - protein, 8 aa, Homo sapiens
FFFATFTL

SEQ ID NO: 1171 - protein, 9 aa, Homo sapiens
SFFFATFTL

SEQ ID NO: 1172 - protein, 9 aa, Homo sapiens
FFFATFTLC

SEQ ID NO: 1173 - protein, 9 aa, Homo sapiens
TRLCWAWEL

SEQ ID NO: 1174 - protein, 9 aa, Homo sapiens
SFFFATFTL

SEQ ID NO: 1175 - protein, 10 aa, Homo sapiens
LTRLCWAWEL

SEQ ID NO: 1176 - protein, 9 aa, Homo sapiens
ACFLEMRTL

SEQ ID NO: 1177 - protein, 10 aa, Homo sapiens
GRLHPDAPLL

SEQ ID NO: 1178 - protein, 9 aa, Homo sapiens
TRLCWAWEL

SEQ ID NO: 1179 - protein, 9 aa, Homo sapiens
SFFFATFTL

SEQ ID NO: 1180 - protein, 9 aa, Homo sapiens
RLHPDAPLL

SEQ ID NO: 1181 - protein, 8 aa, Homo sapiens
LHPDAPLL

SEQ ID NO: 1182 - protein, 8 aa, Homo sapiens
FFFATFTL

SEQ ID NO: 1183 - protein, 9 aa, Homo sapiens
NSDFAPHPY

SEQ ID NO: 1184 - protein, 10 aa, Homo sapiens
SNSDFAPHPY

SEQ ID NO: 1185 - protein, 12 aa, Homo sapiens
CDSNSDFAPHPY

SEQ ID NO: 1186 - protein, 10 aa, Homo sapiens
ASSPSNHWLY

SEQ ID NO: 1187 - protein, 9 aa, Homo sapiens
SSPSNHWLY

SEQ ID NO: 1188 - protein, 9 aa, Homo sapiens
RLLAFPQLL

SEQ ID NO: 1189 - protein, 12 aa, Homo sapiens
RLLAFPQLLPCV

SEQ ID NO: 1190 - protein, 8 aa, Homo sapiens
YMPGVPPA

SEQ ID NO: 1191 - protein, 10 aa, Homo sapiens
ALASVQGHWV

SEQ ID NO: 1192 - protein, 10 aa, Homo sapiens
ALAQALVVQL

SEQ ID NO: 1193 - protein, 9 aa, Homo sapiens
WLYPSPPLT

SEQ ID NO: 1194 - protein, 11 aa, Homo sapiens
LLAFPQLLPCV

SEQ ID NO: 1195 - protein, 8 aa, Homo sapiens
WLYPSPPL

SEQ ID NO: 1196 - protein, 10 aa, Homo sapiens
PRLLAFPQLL

SEQ ID NO: 1197 - protein, 8 aa, Homo sapiens
PLLPPPQV

SEQ ID NO: 1198 - protein, 9 aa, Homo sapiens
SVQGHWVRV

SEQ ID NO: 1199 - protein, 10 aa, Homo sapiens
QLVDSSPHNL

SEQ ID NO: 1200 - protein, 8 aa, Homo sapiens
RLLAFPQL

SEQ ID NO: 1201 - protein, 9 aa, Homo sapiens
YLSLPRPRA

SEQ ID NO: 1202 - protein, 10 aa, Homo sapiens
RQTWRWHQYR

SEQ ID NO: 1203 - protein, 9 aa, Homo sapiens
RALHLLPEK

SEQ ID NO: 1204 - protein, 10 aa, Homo sapiens
RLHSNRQTWR

SEQ ID NO: 1205 - protein, 11 aa, Homo sapiens
RLLAFPQLLPC

SEQ ID NO: 1206 - protein, 9 aa, Homo sapiens
VSLELILQK

SEQ ID NO: 1207 - protein, 10 aa, Homo sapiens
WLYPSPPLTP

SEQ ID NO: 1208 - protein, 9 aa, Homo sapiens
VSLELILQK

SEQ ID NO: 1209 - protein, 10 aa, Homo sapiens
ATAFAAPVAR

SEQ ID NO: 1210 - protein, 9 aa, Homo sapiens
RALHLLPEK

SEQ ID NO: 1211 - protein, 9 aa, Homo sapiens
QTWRWHQYR

SEQ ID NO: 1212 - protein, 9 aa, Homo sapiens
ASVQGHWVR

SEQ ID NO: 1213 - protein, 11 aa, Homo sapiens
LYPSPPLTPSF

SEQ ID NO: 1214 - protein, 9 aa, Homo sapiens
FFHQNYLSL

SEQ ID NO: 1215 - protein, 11 aa, Homo sapiens
RYRTGPRLLAF

SEQ ID NO: 1216 - protein, 9 aa, Homo sapiens
RLLLLQHLW

SEQ ID NO: 1217 - protein, 9 aa, Homo sapiens
SLPSSPTFF

SEQ ID NO: 1218 - protein, 9 aa, Homo sapiens
RYRTGPRLL

SEQ ID NO: 1219 - protein, 10 aa, Homo sapiens
RTRPAATAFA

SEQ ID NO: 1220 - protein, 11 aa, Homo sapiens
RTRPAATAFAA

SEQ ID NO: 1221 - protein, 11 aa, Homo sapiens
HRTRPAATAFA

SEQ ID NO: 1222 - protein, 9 aa, Homo sapiens
VSLELILQK

SEQ ID NO: 1223 - protein, 9 aa, Homo sapiens
RYRTGPRLL

SEQ ID NO: 1224 - protein, 9 aa, Homo sapiens
SVLPGRPTW

SEQ ID NO: 1225 - protein, 9 aa, Homo sapiens
QTWRWHQYR

SEQ ID NO: 1226 - protein, 11 aa, Homo sapiens
NRQTWRWHQYR

SEQ ID NO: 1227 - protein, 10 aa, Homo sapiens
RQTWRWHQYR

SEQ ID NO: 1228 - protein, 9 aa, Homo sapiens
TAFAAPVAR

SEQ ID NO: 1229 - protein, 9 aa, Homo sapiens
NYLSLPRPR

SEQ ID NO: 1230 - protein, 9 aa, Homo sapiens
RPRSPSCPL

SEQ ID NO: 1231 - protein, 9 aa, Homo sapiens
APKQVTTSL

SEQ ID NO: 1232 - protein, 9 aa, Homo sapiens
RPTWGFSQL

SEQ ID NO: 1233 - protein, 10 aa, Homo sapiens
LPRYRTGPRL

SEQ ID NO: 1234 - protein, 10 aa, Homo sapiens
LRPRSPSCPL

SEQ ID NO: 1235 - protein, 10 aa, Homo sapiens
SPSLPSSPTF

SEQ ID NO: 1236 - protein, 10 aa, Homo sapiens
SPSQPQNSSL

SEQ ID NO: 1237 - protein, 10 aa, Homo sapiens
LPRYRTGPRL

SEQ ID NO: 1238 - protein, 11 aa, Homo sapiens
CLRPRSPSCPL

SEQ ID NO: 1239 - protein, 11 aa, Homo sapiens
LPRYRTGPRLL

SEQ ID NO: 1240 - protein, 9 aa, Homo sapiens
PGPKRPVSL

SEQ ID NO: 1241 - protein, 9 aa, Homo sapiens
APKQVTTSL

SEQ ID NO: 1242 - protein, 8 aa, Homo sapiens
GPKRPVSL

SEQ ID NO: 1243 - protein, 10 aa, Homo sapiens
VEYPICLVCL

SEQ ID NO: 1244 - protein, 10 aa, Homo sapiens
RPTWGFSQLV

SEQ ID NO: 1245 - protein, 10 aa, Homo sapiens
GQAPVVEYPI

SEQ ID NO: 1246 - protein, 9 aa, Homo sapiens
GQESGPLRI

SEQ ID NO: 1247 - protein, 9 aa, Homo sapiens
GQARALHLL

SEQ ID NO: 1248 - protein, 9 aa, Homo sapiens
RLLAFPQLL

SEQ ID NO: 1249 - protein, 9 aa, Homo sapiens
RTRPAATAF

SEQ ID NO: 1250 - protein, 10 aa, Homo sapiens
HRTRPAATAF

SEQ ID NO: 1251 - protein, 9 aa, Homo sapiens
RTGPRLLAF

SEQ ID NO: 1252 - protein, 9 aa, Homo sapiens
FFHQNYLSL

SEQ ID NO: 1253 - protein, 9 aa, Homo sapiens
FSGPPPRAP

SEQ ID NO: 1254 - protein, 9 aa, Homo sapiens
PSPPLTPSF

SEQ ID NO: 1255 - protein, 10 aa, Homo sapiens
FAPHPYSPSL

SEQ ID NO: 1256 - protein, 9 aa, Homo sapiens
SSPHNLQPL

SEQ ID NO: 1257 - protein, 9 aa, Homo sapiens
SLPSSPTFF

SEQ ID NO: 1258 - protein, 9 aa, Homo sapiens
FFHQNYLSL

SEQ ID NO: 1259 - protein, 10 aa, Homo sapiens
RLPQGQARAL

SEQ ID NO: 1260 - protein, 9 aa, Homo sapiens
AATAFAAPV

SEQ ID NO: 1261 - protein, 10 aa, Homo sapiens
FAPHPYSPSL

SEQ ID NO: 1262 - protein, 9 aa, Homo sapiens
IAHDLRLLL

SEQ ID NO: 1263 - protein, 9 aa, Homo sapiens
FAAPVARQN

SEQ ID NO: 1264 - protein, 9 aa, Homo sapiens
FFHQNYLSL

SEQ ID NO: 1265 - protein, 9 aa, Homo sapiens
SLPSSPTFF

SEQ ID NO: 1266 - protein, 9 aa, Homo sapiens
AHDLRLLLL

SEQ ID NO: 1267 - protein, 9 aa, Homo sapiens
LVDSSPHNL

SEQ ID NO: 1268 - protein, 10 aa, Homo sapiens
YRTGPRLLAF

SEQ ID NO: 1269 - protein, 9 aa, Homo sapiens
RRIAHDLRL

SEQ ID NO: 1270 - protein, 9 aa, Homo sapiens
YRTGPRLLA

SEQ ID NO: 1271 - protein, 10 aa, Homo sapiens
RRIAHDLRLL

SEQ ID NO: 1272 - protein, 8 aa, Homo sapiens
KRPVSLEL

SEQ ID NO: 1273 - protein, 9 aa, Homo sapiens
TGQAPVVEY

SEQ ID NO: 1274 - protein, 9 aa, Homo sapiens
FFHQNYLSL

SEQ ID NO: 1275 - protein, 10 aa, Homo sapiens
YRTGPRLLAF

SEQ ID NO: 1276 - protein, 9 aa, Homo sapiens
RRIAHDLRL

SEQ ID NO: 1277 - protein, 8 aa, Homo sapiens
KRPVSLEL

SEQ ID NO: 1278 - protein, 8 aa, Homo sapiens
YRTGPRLL

SEQ ID NO: 1279 - protein, 11 aa, Homo sapiens
NRPGPSRGVSY

SEQ ID NO: 1280 - protein, 10 aa, Homo sapiens
WTFRGKIHAF

SEQ ID NO: 1281 - protein, 9 aa, Homo sapiens
WMENNGHIA

SEQ ID NO: 1282 - protein, 9 aa, Homo sapiens
WVEERALLE

SEQ ID NO: 1283 - protein, 9 aa, Homo sapiens
LLEGEKALW

SEQ ID NO: 1284 - protein, 9 aa, Homo sapiens
LWEDKTSLW

SEQ ID NO: 1285 - protein, 9 aa, Homo sapiens
LWEEENALW

SEQ ID NO: 1286 - protein, 9 aa, Homo sapiens
SLWEEENAL

SEQ ID NO: 1287 - protein, 9 aa, Homo sapiens
ALWEDKTSL

SEQ ID NO: 1288 - protein, 9 aa, Homo sapiens
SLAASSPSI

SEQ ID NO: 1289 - protein, 9 aa, Homo sapiens
ALWEEEKAL

SEQ ID NO: 1290 - protein, 9 aa, Homo sapiens
ALWERDRNL

SEQ ID NO: 1291 - protein, 10 aa, Homo sapiens
ALWERDRNLL

SEQ ID NO: 1292 - protein, 11 aa, Homo sapiens
ALWEEEKALWV

SEQ ID NO: 1293 - protein, 9 aa, Homo sapiens
ALLEGEKAL

SEQ ID NO: 1294 - protein, 10 aa, Homo sapiens
ALWVEERALL

SEQ ID NO: 1295 - protein, 9 aa, Homo sapiens
MLEDGPHNA

SEQ ID NO: 1296 - protein, 10 aa, Homo sapiens
RLIRKMFSFK

SEQ ID NO: 1297 - protein, 9 aa, Homo sapiens
LIRKMFSFK

SEQ ID NO: 1298 - protein, 9 aa, Homo sapiens
KMFSFKVSR

SEQ ID NO: 1299 - protein, 10 aa, Homo sapiens
ATPPFRLIRK

SEQ ID NO: 1300 - protein, 9 aa, Homo sapiens
ASSPSIRQK

SEQ ID NO: 1301 - protein, 10 aa, Homo sapiens
ATPPFRLIRK

SEQ ID NO: 1302 - protein, 10 aa, Homo sapiens
RLIRKMFSFK

SEQ ID NO: 1303 - protein, 12 aa, Homo sapiens
KTFWKKYRTFWK

SEQ ID NO: 1304 - protein, 9 aa, Homo sapiens
ASSPSIRQK

SEQ ID NO: 1305 - protein, 9 aa, Homo sapiens
ATPPFRLIR

SEQ ID NO: 1306 - protein, 9 aa, Homo sapiens
RLIRKMFSF

SEQ ID NO: 1307 - protein, 9 aa, Homo sapiens
TFWKKYRTF

SEQ ID NO: 1308 - protein, 8 aa, Homo sapiens
RWMGLACF

SEQ ID NO: 1309 - protein, 9 aa, Homo sapiens
PFWEEEKTF

SEQ ID NO: 1310 - protein, 9 aa, Homo sapiens
IFREKIEDF

SEQ ID NO: 1311 - protein, 10 aa, Homo sapiens
RLIRKMFSFK

SEQ ID NO: 1312 - protein, 9 aa, Homo sapiens
LIRKMFSFK

SEQ ID NO: 1313 - protein, 10 aa, Homo sapiens
KYRTFWKEDK

SEQ ID NO: 1314 - protein, 9 aa, Homo sapiens
KYRTFWKED

SEQ ID NO: 1315 - protein, 9 aa, Homo sapiens
ASSPSIRQK

SEQ ID NO: 1316 - protein, 9 aa, Homo sapiens
SSPSIRQKK

SEQ ID NO: 1317 - protein, 10 aa, Homo sapiens
TFRGKIHAFR

SEQ ID NO: 1318 - protein, 10 aa, Homo sapiens
SFWEMEKSFR

SEQ ID NO: 1319 - protein, 10 aa, Homo sapiens
DFREEMWTFR

SEQ ID NO: 1320 - protein, 9 aa, Homo sapiens
EDGPHNANR

SEQ ID NO: 1321 - protein, 9 aa, Homo sapiens
ENALWEEER

SEQ ID NO: 1322 - protein, 9 aa, Homo sapiens
SPSIRQKKL

SEQ ID NO: 1323 - protein, 10 aa, Homo sapiens
SPSIRQKKLM

SEQ ID NO: 1324 - protein, 10 aa, Homo sapiens
SSPSIRQKKL

SEQ ID NO: 1325 - protein, 9 aa, Homo sapiens
IHAFRGQIL

SEQ ID NO: 1326 - protein, 10 aa, Homo sapiens
FRLIRKMFSF

SEQ ID NO: 1327 - protein, 9 aa, Homo sapiens
TFRGKIHAF

SEQ ID NO: 1328 - protein, 9 aa, Homo sapiens
RLIRKMFSF

SEQ ID NO: 1329 - protein, 9 aa, Homo sapiens
ALWEDKTSL

SEQ ID NO: 1330 - protein, 8 aa, Homo sapiens
FWKEDNAL

SEQ ID NO: 1331 - protein, 9 aa, Homo sapiens
ALWERDRNL

SEQ ID NO: 1332 - protein, 10 aa, Homo sapiens
RSLAASSPSI

SEQ ID NO: 1333 - protein, 9 aa, Homo sapiens
MATPPFRLI

SEQ ID NO: 1334 - protein, 11 aa, Homo sapiens
REEMWTFRGKI

SEQ ID NO: 1335 - protein, 9 aa, Homo sapiens
RQKKLMHKL

SEQ ID NO: 1336 - protein, 9 aa, Homo sapiens
KAFREEMKI

SEQ ID NO: 1337 - protein, 9 aa, Homo sapiens
GQILGFWEE

SEQ ID NO: 1338 - protein, 9 aa, Homo sapiens
FSFKVSRWM

SEQ ID NO: 1339 - protein, 10 aa, Homo sapiens
WTFRGKIHAF

SEQ ID NO: 1340 - protein, 10 aa, Homo sapiens
HAFRGQILGF

SEQ ID NO: 1341 - protein, 9 aa, Homo sapiens
VSRWMGLAC

SEQ ID NO: 1342 - protein, 9 aa, Homo sapiens
TFRGKIHAF

SEQ ID NO: 1343 - protein, 9 aa, Homo sapiens
ALWEDKTSL

SEQ ID NO: 1344 - protein, 9 aa, Homo sapiens
MATPPFRLI

SEQ ID NO: 1345 - protein, 9 aa, Homo sapiens
SLAASSPSI

SEQ ID NO: 1346 - protein, 9 aa, Homo sapiens
FSFKVSRWM

SEQ ID NO: 1347 - protein, 9 aa, Homo sapiens
ALWEDKTSL

SEQ ID NO: 1348 - protein, 9 aa, Homo sapiens
SLWEEENAL

SEQ ID NO: 1349 - protein, 9 aa, Homo sapiens
ALWEEEKAL

SEQ ID NO: 1350 - protein, 9 aa, Homo sapiens
MATPPFRLI

SEQ ID NO: 1351 - protein, 9 aa, Homo sapiens
FSFKVSRWM

SEQ ID NO: 1352 - protein, 9 aa, Homo sapiens
MGLACFRSL

SEQ ID NO: 1353 - protein, 8 aa, Homo sapiens
HAFRGQIL

SEQ ID NO: 1354 - protein, 9 aa, Homo sapiens
MATPPFRLI

SEQ ID NO: 1355 - protein, 9 aa, Homo sapiens
FWEEERPFW

SEQ ID NO: 1356 - protein, 9 aa, Homo sapiens
FWMENNGHI

SEQ ID NO: 1357 - protein, 9 aa, Homo sapiens
SFWEMEKSF

SEQ ID NO: 1358 - protein, 8 aa, Homo sapiens
FWEEEKTF

SEQ ID NO: 1359 - protein, 8 aa, Homo sapiens
LWEEENAL

SEQ ID NO: 1360 - protein, 9 aa, Homo sapiens
NRGQRLLAF

SEQ ID NO: 1361 - protein, 9 aa, Homo sapiens
FSFKVSRWM

SEQ ID NO: 1362 - protein, 9 aa, Homo sapiens
FKVSRWMGL

SEQ ID NO: 1363 - protein, 8 aa, Homo sapiens
FRGQILGF

SEQ ID NO: 1364 - protein, 8 aa, Homo sapiens
FRGKIHAF

SEQ ID NO: 1365 - protein, 8 aa, Homo sapiens
ANRGQRLL

SEQ ID NO: 1366 - protein, 9 aa, Homo sapiens
NRGQRLLAF

SEQ ID NO: 1367 - protein, 9 aa, Homo sapiens
TFRGKIHAF

SEQ ID NO: 1368 - protein, 9 aa, Homo sapiens
TFWKKYRTF

SEQ ID NO: 1369 - protein, 10 aa, Homo sapiens
FRLIRKMFSF

SEQ ID NO: 1370 - protein, 8 aa, Homo sapiens
FRGKIHAF

SEQ ID NO: 1371 - protein, 8 aa, Homo sapiens
FRGQILGF

SEQ ID NO: 1372 - protein, 8 aa, Homo sapiens
FREEMWTF

SEQ ID NO: 1373 - protein, 11 aa, Homo sapiens
LSCGDPTYPPY

SEQ ID NO: 1374 - protein, 9 aa, Homo sapiens
CGDPTYPPY

SEQ ID NO: 1375 - protein, 10 aa, Homo sapiens
LTDKIQLACL

SEQ ID NO: 1376 - protein, 12 aa, Homo sapiens
ALSCGDPTYPPY

SEQ ID NO: 1377 - protein, 9 aa, Homo sapiens
LTDKIQLAC

SEQ ID NO: 1378 - protein, 11 aa, Homo sapiens
NSWPWQVSLQY

SEQ ID NO: 1379 - protein, 8 aa, Homo sapiens
LTDKIQLA

SEQ ID NO: 1380 - protein, 9 aa, Homo sapiens
SLIANSWVL

SEQ ID NO: 1381 - protein, 10 aa, Homo sapiens
ILPNNYPCYV

SEQ ID NO: 1382 - protein, 9 aa, Homo sapiens
ALLKLANPV

SEQ ID NO: 1383 - protein, 9 aa, Homo sapiens
GLGRHNLYV

SEQ ID NO: 1384 - protein, 9 aa, Homo sapiens
LLSTLVAGA

SEQ ID NO: 1385 - protein, 10 aa, Homo sapiens
LLLSTLVAGA

SEQ ID NO: 1386 - protein, 9 aa, Homo sapiens
YIDWINSVI

SEQ ID NO: 1387 - protein, 9 aa, Homo sapiens
IQLACLPPA

SEQ ID NO: 1388 - protein, 8 aa, Homo sapiens
SLIANSWV

SEQ ID NO: 1389 - protein, 10 aa, Homo sapiens
LLSTLVAGAL

SEQ ID NO: 1390 - protein, 9 aa, Homo sapiens
SLTDKIQLA

SEQ ID NO: 1391 - protein, 9 aa, Homo sapiens
VLQQGRLLV

SEQ ID NO: 1392 - protein, 8 aa, Homo sapiens
KLANPVSL

SEQ ID NO: 1393 - protein, 8 aa, Homo sapiens
SLTDKIQL

SEQ ID NO: 1394 - protein, 10 aa, Homo sapiens
YVAESGSLAV

SEQ ID NO: 1395 - protein, 10 aa, Homo sapiens
VLQQGRLLVV

SEQ ID NO: 1396 - protein, 11 aa, Homo sapiens
KLANPVSLTDK

SEQ ID NO: 1397 - protein, 10 aa, Homo sapiens
SSAWWGSSVK

SEQ ID NO: 1398 - protein, 9 aa, Homo sapiens
RTYRVGLGR

SEQ ID NO: 1399 - protein, 12 aa, Homo sapiens
LKLANPVSLTDK

SEQ ID NO: 1400 - protein, 9 aa, Homo sapiens
SVFTRVSNY

SEQ ID NO: 1401 - protein, 9 aa, Homo sapiens
SVSKIVVHK

SEQ ID NO: 1402 - protein, 9 aa, Homo sapiens
GSLAVSVSK

SEQ ID NO: 1403 - protein, 10 aa, Homo sapiens
SGSLAVSVSK

SEQ ID NO: 1404 - protein, 9 aa, Homo sapiens
PTYPPYVTR

SEQ ID NO: 1405 - protein, 10 aa, Homo sapiens
RWQVHGIVSF

SEQ ID NO: 1406 - protein, 9 aa, Homo sapiens
TYPPYVTRV

SEQ ID NO: 1407 - protein, 9 aa, Homo sapiens
NYYHKPSVF

SEQ ID NO: 1408 - protein, 10 aa, Homo sapiens
NYIDWINSVI

SEQ ID NO: 1409 - protein, 9 aa, Homo sapiens
NYIDWINSV

SEQ ID NO: 1410 - protein, 9 aa, Homo sapiens
SSRTYRVGL

SEQ ID NO: 1411 - protein, 9 aa, Homo sapiens
GSLAVSVSK

SEQ ID NO: 1412 - protein, 9 aa, Homo sapiens
SVKTSMICA

SEQ ID NO: 1413 - protein, 9 aa, Homo sapiens
RTLLLSTLV

SEQ ID NO: 1414 - protein, 9 aa, Homo sapiens
KGNDIALLK

SEQ ID NO: 1415 - protein, 9 aa, Homo sapiens
SVSKIVVHK

SEQ ID NO: 1416 - protein, 9 aa, Homo sapiens
SVFTRVSNY

SEQ ID NO: 1417 - protein, 9 aa, Homo sapiens
CISSSRTYR

SEQ ID NO: 1418 - protein, 10 aa, Homo sapiens
HCISSSRTYR

SEQ ID NO: 1419 - protein, 10 aa, Homo sapiens
YYHKPSVFTR

SEQ ID NO: 1420 - protein, 11 aa, Homo sapiens
NYYHKPSVFTR

SEQ ID NO: 1421 - protein, 9 aa, Homo sapiens
PTYPPYVTR

SEQ ID NO: 1422 - protein, 11 aa, Homo sapiens
RPNSWPWQVSL

SEQ ID NO: 1423 - protein, 9 aa, Homo sapiens
YPPYVTRVV

SEQ ID NO: 1424 - protein, 12 aa, Homo sapiens
ARPNSWPWQVSL

SEQ ID NO: 1425 - protein, 9 aa, Homo sapiens
RPNSWPWQV

SEQ ID NO: 1426 - protein, 8 aa, Homo sapiens
LPPAGTIL

SEQ ID NO: 1427 - protein, 10 aa, Homo sapiens
MIRTLLLSTL

SEQ ID NO: 1428 - protein, 10 aa, Homo sapiens
LLKLANPVSL

SEQ ID NO: 1429 - protein, 9 aa, Homo sapiens
SSRTYRVGL

SEQ ID NO: 1430 - protein, 8 aa, Homo sapiens
SLTDKIQL

SEQ ID NO: 1431 - protein, 8 aa, Homo sapiens
VLQQGRLL

SEQ ID NO: 1432 - protein, 8 aa, Homo sapiens
KLANPVSL

SEQ ID NO: 1433 - protein, 9 aa, Homo sapiens
RTLLLSTLV

SEQ ID NO: 1434 - protein, 9 aa, Homo sapiens
IDWINSVIA

SEQ ID NO: 1435 - protein, 10 aa, Homo sapiens
SNYIDWINSV

SEQ ID NO: 1436 - protein, 9 aa, Homo sapiens
RVSNYIDWI

SEQ ID NO: 1437 - protein, 9 aa, Homo sapiens
SLAVSVSKI

SEQ ID NO: 1438 - protein, 9 aa, Homo sapiens
NQISKGNDI

SEQ ID NO: 1439 - protein, 9 aa, Homo sapiens
YATCSSSAW

SEQ ID NO: 1440 - protein, 9 aa, Homo sapiens
WQVHGIVSF

SEQ ID NO: 1441 - protein, 9 aa, Homo sapiens
SVFTRVSNY

SEQ ID NO: 1442 - protein, 9 aa, Homo sapiens
SSAWWGSSV

SEQ ID NO: 1443 - protein, 9 aa, Homo sapiens
NSWPWQVSL

SEQ ID NO: 1444 - protein, 9 aa, Homo sapiens
CLPPAGTIL

SEQ ID NO: 1445 - protein, 9 aa, Homo sapiens
YIDWINSVI

SEQ ID NO: 1446 - protein, 9 aa, Homo sapiens
NSWPWQVSL

SEQ ID NO: 1447 - protein, 8 aa, Homo sapiens
SAWWGSSV

SEQ ID NO: 1448 - protein, 9 aa, Homo sapiens
SSAWWGSSV

SEQ ID NO: 1449 - protein, 9 aa, Homo sapiens
YATCSSSAW

SEQ ID NO: 1450 - protein, 9 aa, Homo sapiens
LSTLVAGAL

SEQ ID NO: 1451 - protein, 9 aa, Homo sapiens
NSWPWQVSL

SEQ ID NO: 1452 - protein, 9 aa, Homo sapiens
LANPVSLTD

SEQ ID NO: 1453 - protein, 9 aa, Homo sapiens
YIDWINSVI

SEQ ID NO: 1454 - protein, 9 aa, Homo sapiens
WYHTCGGSL

SEQ ID NO: 1455 - protein, 9 aa, Homo sapiens
CLPPAGTIL

SEQ ID NO: 1456 - protein, 9 aa, Homo sapiens
NYYHKPSVF

SEQ ID NO: 1457 - protein, 9 aa, Homo sapiens
TYPPYVTRV

SEQ ID NO: 1458 - protein, 8 aa, Homo sapiens
YYHKPSVF

SEQ ID NO: 1459 - protein, 9 aa, Homo sapiens
NYIDWINSV

SEQ ID NO: 1460 - protein, 9 aa, Homo sapiens
IRTLLLSTL

SEQ ID NO: 1461 - protein, 10 aa, Homo sapiens
YRVGLGRHNL

SEQ ID NO: 1462 - protein, 9 aa, Homo sapiens
NSWPWQVSL

SEQ ID NO: 1463 - protein, 9 aa, Homo sapiens
TNGAVPDVL

SEQ ID NO: 1464 - protein, 9 aa, Homo sapiens
LANPVSLTD

SEQ ID NO: 1465 - protein, 9 aa, Homo sapiens
NYYHKPSVF

SEQ ID NO: 1466 - protein, 9 aa, Homo sapiens
TYPPYVTRV

SEQ ID NO: 1467 - protein, 9 aa, Homo sapiens
NYIDWINSV

SEQ ID NO: 1468 - protein, 8 aa, Homo sapiens
YYHKPSVF

SEQ ID NO: 1469 - protein, 10 aa, Homo sapiens
ARPNSWPWQV

SEQ ID NO: 1470 - protein, 10 aa, Homo sapiens
LTSVLGCNYY

SEQ ID NO: 1471 - protein, 9 aa, Homo sapiens
LTSVLGCNY

SEQ ID NO: 1472 - protein, 11 aa, Homo sapiens
LTSVLGCNYYY

SEQ ID NO: 1473 - protein, 8 aa, Homo sapiens
YSSNGQWY

SEQ ID NO: 1474 - protein, 9 aa, Homo sapiens
MLGQHNLYV

SEQ ID NO: 1475 - protein, 10 aa, Homo sapiens
VMLGQHNLYV

SEQ ID NO: 1476 - protein, 10 aa, Homo sapiens
LVAGALSCGV

SEQ ID NO: 1477 - protein, 10 aa, Homo sapiens
MLGQHNLYVA

SEQ ID NO: 1478 - protein, 9 aa, Homo sapiens
VLQRCSLIL

SEQ ID NO: 1479 - protein, 12 aa, Homo sapiens
YRVMLGQHNLYV

SEQ ID NO: 1480 - protein, 10 aa, Homo sapiens
ALSCGVSTYA

SEQ ID NO: 1481 - protein, 12 aa, Homo sapiens
FVRDLCSSQLEL

SEQ ID NO: 1482 - protein, 10 aa, Homo sapiens
SLILFFVRDL

SEQ ID NO: 1483 - protein, 11 aa, Homo sapiens
RVMLGQHNLYV

SEQ ID NO: 1484 - protein, 9 aa, Homo sapiens
ALPDDLKQG

SEQ ID NO: 1485 - protein, 9 aa, Homo sapiens
DLKQGQLLV

SEQ ID NO: 1486 - protein, 9 aa, Homo sapiens
DLCSSQLEL

SEQ ID NO: 1487 - protein, 8 aa, Homo sapiens
SQLELTGV

SEQ ID NO: 1488 - protein, 11 aa, Homo sapiens
ALPDDLKQGQL

SEQ ID NO: 1489 - protein, 9 aa, Homo sapiens
AGSSGIYRV

SEQ ID NO: 1490 - protein, 10 aa, Homo sapiens
SVLGCNYYYK

SEQ ID NO: 1491 - protein, 9 aa, Homo sapiens
VLGCNYYYK

SEQ ID NO: 1492 - protein, 10 aa, Homo sapiens
SSGWWGSTVK

SEQ ID NO: 1493 - protein, 9 aa, Homo sapiens
SIFTRVSNY

SEQ ID NO: 1494 - protein, 9 aa, Homo sapiens
SVLGCNYYY

SEQ ID NO: 1495 - protein, 10 aa, Homo sapiens
SVLGCNYYYK

SEQ ID NO: 1496 - protein, 9 aa, Homo sapiens
STYAPDMSR

SEQ ID NO: 1497 - protein, 10 aa, Homo sapiens
SSGWWGSTVK

SEQ ID NO: 1498 - protein, 11 aa, Homo sapiens
SSSGWWGSTVK

SEQ ID NO: 1499 - protein, 11 aa, Homo sapiens
GVSAGSSGIYR

SEQ ID NO: 1500 - protein, 9 aa, Homo sapiens
NYYYKPSIF

SEQ ID NO: 1501 - protein, 10 aa, Homo sapiens
YYKPSIFTRV

SEQ ID NO: 1502 - protein, 10 aa, Homo sapiens
CNYYYKPSIF

SEQ ID NO: 1503 - protein, 9 aa, Homo sapiens
TYAPDMSRM

SEQ ID NO: 1504 - protein, 8 aa, Homo sapiens
YYYKPSIF

SEQ ID NO: 1505 - protein, 10 aa, Homo sapiens
AAHCIRQIIK

SEQ ID NO: 1506 - protein, 9 aa, Homo sapiens
KVLQRCSLI

SEQ ID NO: 1507 - protein, 9 aa, Homo sapiens
RVMLGQHNL

SEQ ID NO: 1508 - protein, 10 aa, Homo sapiens
MSRMLGGEEA

SEQ ID NO: 1509 - protein, 10 aa, Homo sapiens
SVLGCNYYYK

SEQ ID NO: 1510 - protein, 9 aa, Homo sapiens
SIFTRVSNY

SEQ ID NO: 1511 - protein, 9 aa, Homo sapiens
YYKPSIFTR

SEQ ID NO: 1512 - protein, 10 aa, Homo sapiens
YYYKPSIFTR

SEQ ID NO: 1513 - protein, 9 aa, Homo sapiens
STYAPDMSR

SEQ ID NO: 1514 - protein, 11 aa, Homo sapiens
NYYYKPSIFTR

SEQ ID NO: 1515 - protein, 9 aa, Homo sapiens
RVMLGQHNL

SEQ ID NO: 1516 - protein, 9 aa, Homo sapiens
KPSIFTRVS

SEQ ID NO: 1517 - protein, 10 aa, Homo sapiens
FVRDLCSSQL

SEQ ID NO: 1518 - protein, 8 aa, Homo sapiens
APDMSRML

SEQ ID NO: 1519 - protein, 10 aa, Homo sapiens
LPDDLKQGQL

SEQ ID NO: 1520 - protein, 9 aa, Homo sapiens
APDMSRMLG

SEQ ID NO: 1521 - protein, 10 aa, Homo sapiens
WGRLQTNGAL

SEQ ID NO: 1522 - protein, 8 aa, Homo sapiens
IIKAHKVL

SEQ ID NO: 1523 - protein, 8 aa, Homo sapiens
KVLQRCSL

SEQ ID NO: 1524 - protein, 8 aa, Homo sapiens
DLKQGQLL

SEQ ID NO: 1525 - protein, 9 aa, Homo sapiens
QIIKAHKVL

SEQ ID NO: 1526 - protein, 12 aa, Homo sapiens
GQWYHTCGGSLI

SEQ ID NO: 1527 - protein, 9 aa, Homo sapiens
CNYYYKPSI

SEQ ID NO: 1528 - protein, 10 aa, Homo sapiens
SNYNDWINSV

SEQ ID NO: 1529 - protein, 9 aa, Homo sapiens
RQIIKAHKV

SEQ ID NO: 1530 - protein, 9 aa, Homo sapiens
RVSNYNDWI

SEQ ID NO: 1531 - protein, 9 aa, Homo sapiens
AGSSGIYRV

SEQ ID NO: 1532 - protein, 9 aa, Homo sapiens
VSAGSSGIY

SEQ ID NO: 1533 - protein, 9 aa, Homo sapiens
SSSGIYRVM

SEQ ID NO: 1534 - protein, 9 aa, Homo sapiens
ALSCGVSTY

SEQ ID NO: 1535 - protein, 9 aa, Homo sapiens
AAHCISSSG

SEQ ID NO: 1536 - protein, 9 aa, Homo sapiens
VSKGNDIAL

SEQ ID NO: 1537 - protein, 9 aa, Homo sapiens
YAPDMSRML

SEQ ID NO: 1538 - protein, 9 aa, Homo sapiens
VLQRCSLIL

SEQ ID NO: 1539 - protein, 9 aa, Homo sapiens
RVMLGQHNL

SEQ ID NO: 1540 - protein, 10 aa, Homo sapiens
FVRDLCSSQL

SEQ ID NO: 1541 - protein, 8 aa, Homo sapiens
YAPDMSRM

SEQ ID NO: 1542 - protein, 9 aa, Homo sapiens
DLCSSQLEL

SEQ ID NO: 1543 - protein, 9 aa, Homo sapiens
YAPDMSRML

SEQ ID NO: 1544 - protein, 9 aa, Homo sapiens
SSSGIYRVM

SEQ ID NO: 1545 - protein, 9 aa, Homo sapiens
HGIGSLTSV

SEQ ID NO: 1546 - protein, 9 aa, Homo sapiens
VSKGNDIAL

SEQ ID NO: 1547 - protein, 9 aa, Homo sapiens
QIIKAHKVL

SEQ ID NO: 1548 - protein, 9 aa, Homo sapiens
YNDWINSVI

SEQ ID NO: 1549 - protein, 11 aa, Homo sapiens
FFVRDLCSSQL

SEQ ID NO: 1550 - protein, 9 aa, Homo sapiens
VRDLCSSQL

SEQ ID NO: 1551 - protein, 9 aa, Homo sapiens
NYYYKPSIF

SEQ ID NO: 1552 - protein, 9 aa, Homo sapiens
NYNDWINSV

SEQ ID NO: 1553 - protein, 8 aa, Homo sapiens
YYYKPSIF

SEQ ID NO: 1554 - protein, 9 aa, Homo sapiens
NYNDWINSV

SEQ ID NO: 1555 - protein, 10 aa, Homo sapiens
YRVMLGQHNL

SEQ ID NO: 1556 - protein, 9 aa, Homo sapiens
VRDLCSSQL

SEQ ID NO: 1557 - protein, 9 aa, Homo sapiens
NYYYKPSIF

SEQ ID NO: 1558 - protein, 9 aa, Homo sapiens
SSGIYRVML

SEQ ID NO: 1559 - protein, 9 aa, Homo sapiens
RVMLGQHNL

SEQ ID NO: 1560 - protein, 9 aa, Homo sapiens
QRCSLILFF

SEQ ID NO: 1561 - protein, 9 aa, Homo sapiens
NYYYKPSIF

SEQ ID NO: 1562 - protein, 9 aa, Homo sapiens
TYAPDMSRM

SEQ ID NO: 1563 - protein, 9 aa, Homo sapiens
NYNDWINSV

SEQ ID NO: 1564 - protein, 9 aa, Homo sapiens
YYKPSIFTR

SEQ ID NO: 1565 - protein, 8 aa, Homo sapiens
YYYKPSIF

SEQ ID NO: 1566 - protein, 9 aa, Homo sapiens
TIDAKELKV

SEQ ID NO: 1567 - protein, 10 aa, Homo sapiens
ISFNDFLAVM

SEQ ID NO: 1568 - protein, 9 aa, Homo sapiens
LTEDQKQEV

SEQ ID NO: 1569 - protein, 12 aa, Homo sapiens
FNDFLAVMTQKM

SEQ ID NO: 1570 - protein, 8 aa, Homo sapiens
TIDAKELK

SEQ ID NO: 1571 - protein, 10 aa, Homo sapiens
KISFNDFLAV

SEQ ID NO: 1572 - protein, 9 aa, Homo sapiens
FLAVMTQKM

SEQ ID NO: 1573 - protein, 9 aa, Homo sapiens
ISFNDFLAV

SEQ ID NO: 1574 - protein, 9 aa, Homo sapiens
KISFNDFLA

SEQ ID NO: 1575 - protein, 11 aa, Homo sapiens
GKISFNDFLAV

SEQ ID NO: 1576 - protein, 10 aa, Homo sapiens
DFLAVMTQKM

SEQ ID NO: 1577 - protein, 12 aa, Homo sapiens
TGKISFNDFLAV

SEQ ID NO: 1578 - protein, 10 aa, Homo sapiens
FLAVMTQKMS

SEQ ID NO: 1579 - protein, 11 aa, Homo sapiens
KISFNDFLAVM

SEQ ID NO: 1580 - protein, 9 aa, Homo sapiens
RLFDDDETG

SEQ ID NO: 1581 - protein, 9 aa, Homo sapiens
TIDAKELKV

SEQ ID NO: 1582 - protein, 10 aa, Homo sapiens
ELTEDQKQEV

SEQ ID NO: 1583 - protein, 11 aa, Homo sapiens
RLFDDDETGKI

SEQ ID NO: 1584 - protein, 10 aa, Homo sapiens
RLFDDDETGK

SEQ ID NO: 1585 - protein, 10 aa, Homo sapiens
GTIDAKELKV

SEQ ID NO: 1586 - protein, 9 aa, Homo sapiens
NLKRVANEL

SEQ ID NO: 1587 - protein, 10 aa, Homo sapiens
AVMTQKMSEK

SEQ ID NO: 1588 - protein, 10 aa, Homo sapiens
KPSAASTGQK

SEQ ID NO: 1589 - protein, 11 aa, Homo sapiens
AMRALGFEPRK

SEQ ID NO: 1590 - protein, 10 aa, Homo sapiens
RLFDDDETGK

SEQ ID NO: 1591 - protein, 9 aa, Homo sapiens
RALGFEPRK

SEQ ID NO: 1592 - protein, 10 aa, Homo sapiens
AVMTQKMSEK

SEQ ID NO: 1593 - protein, 9 aa, Homo sapiens
GTIDAKELK

SEQ ID NO: 1594 - protein, 10 aa, Homo sapiens
SGTIDAKELK

SEQ ID NO: 1595 - protein, 9 aa, Homo sapiens
RALGFEPRK

SEQ ID NO: 1596 - protein, 9 aa, Homo sapiens
EILKAFRLF

SEQ ID NO: 1597 - protein, 9 aa, Homo sapiens
SFNDFLAVM

SEQ ID NO: 1598 - protein, 8 aa, Homo sapiens
ILKAFRLF

SEQ ID NO: 1599 - protein, 9 aa, Homo sapiens
EVREAFDLF

SEQ ID NO: 1600 - protein, 9 aa, Homo sapiens
GQKRKVAPK

SEQ ID NO: 1601 - protein, 9 aa, Homo sapiens
RALGFEPRK

SEQ ID NO: 1602 - protein, 11 aa, Homo sapiens
AMRALGFEPRK

SEQ ID NO: 1603 - protein, 9 aa, Homo sapiens
GTIDAKELK

SEQ ID NO: 1604 - protein, 10 aa, Homo sapiens
RLFDDDETGK

SEQ ID NO: 1605 - protein, 9 aa, Homo sapiens
EVNEEEFLR

SEQ ID NO: 1606 - protein, 10 aa, Homo sapiens
AMRALGFEPR

SEQ ID NO: 1607 - protein, 9 aa, Homo sapiens
DFLAVMTQK

SEQ ID NO: 1608 - protein, 10 aa, Homo sapiens
DAKELKVAMR

SEQ ID NO: 1609 - protein, 9 aa, Homo sapiens
SAASTGQKR

SEQ ID NO: 1610 - protein, 10 aa, Homo sapiens
EPRKEEMKKM

SEQ ID NO: 1611 - protein, 10 aa, Homo sapiens
RVANELGENL

SEQ ID NO: 1612 - protein, 9 aa, Homo sapiens
KPSAASTGQ

SEQ ID NO: 1613 - protein, 9 aa, Homo sapiens
APKPELTED

SEQ ID NO: 1614 - protein, 9 aa, Homo sapiens
RKVAPKPEL

SEQ ID NO: 1615 - protein, 12 aa, Homo sapiens
EEFLRIMKKTSL

SEQ ID NO: 1616 - protein, 9 aa, Homo sapiens
NLKRVANEL

SEQ ID NO: 1617 - protein, 11 aa, Homo sapiens
FKNLKRVANEL

SEQ ID NO: 1618 - protein, 9 aa, Homo sapiens
DAKELKVAM

SEQ ID NO: 1619 - protein, 9 aa, Homo sapiens
TGQKRKVAP

SEQ ID NO: 1620 - protein, 8 aa, Homo sapiens
EILKAFRL

SEQ ID NO: 1621 - protein, 9 aa, Homo sapiens
ISFNDFLAV

SEQ ID NO: 1622 - protein, 9 aa, Homo sapiens
REAFDLFDV

SEQ ID NO: 1623 - protein, 9 aa, Homo sapiens
FDVDGSGTI

SEQ ID NO: 1624 - protein, 9 aa, Homo sapiens
TIDAKELKV

SEQ ID NO: 1625 - protein, 9 aa, Homo sapiens
ASTGQKRKV

SEQ ID NO: 1626 - protein, 9 aa, Homo sapiens
FLAVMTQKM

SEQ ID NO: 1627 - protein, 9 aa, Homo sapiens
ISFNDFLAV

SEQ ID NO: 1628 - protein, 10 aa, Homo sapiens
ISFNDFLAVM

SEQ ID NO: 1629 - protein, 8 aa, Homo sapiens
VANELGEN

SEQ ID NO: 1630 - protein, 9 aa, Homo sapiens
VANELGENL

SEQ ID NO: 1631 - protein, 9 aa, Homo sapiens
DAKELKVAM

SEQ ID NO: 1632 - protein, 9 aa, Homo sapiens
FLAVMTQKM

SEQ ID NO: 1633 - protein, 9 aa, Homo sapiens
ISFNDFLAV

SEQ ID NO: 1634 - protein, 9 aa, Homo sapiens
SFNDFLAVM

SEQ ID NO: 1635 - protein, 9 aa, Homo sapiens
VANELGENL

SEQ ID NO: 1636 - protein, 10 aa, Homo sapiens
VAPKPELTED

SEQ ID NO: 1637 - protein, 9 aa, Homo sapiens
VAPKPELTE

SEQ ID NO: 1638 - protein, 9 aa, Homo sapiens
ISFNDFLAV

SEQ ID NO: 1639 - protein, 9 aa, Homo sapiens
FLAVMTQKM

SEQ ID NO: 1640 - protein, 9 aa, Homo sapiens
VANELGENL

SEQ ID NO: 1641 - protein, 8 aa, Homo sapiens
GTIDAKEL

SEQ ID NO: 1642 - protein, 8 aa, Homo sapiens
KVAPKPEL

SEQ ID NO: 1643 - protein, 9 aa, Homo sapiens
SFNDFLAVM

SEQ ID NO: 1644 - protein, 10 aa, Homo sapiens
LFDVDGSGTI

SEQ ID NO: 1645 - protein, 9 aa, Homo sapiens
FLAVMTQKM

SEQ ID NO: 1646 - protein, 9 aa, Homo sapiens
AFDLFDVDG

SEQ ID NO: 1647 - protein, 9 aa, Homo sapiens
SFNDFLAVM

SEQ ID NO: 1648 - protein, 9 aa, Homo sapiens
ISFNDFLAV

SEQ ID NO: 1649 - protein, 9 aa, Homo sapiens
FLAVMTQKM

SEQ ID NO: 1650 - protein, 9 aa, Homo sapiens
REGTGKISF

SEQ ID NO: 1651 - protein, 9 aa, Homo sapiens
APKPELTED

SEQ ID NO: 1652 - protein, 8 aa, Homo sapiens
KVAPKPEL

SEQ ID NO: 1653 - protein, 9 aa, Homo sapiens
SFNDFLAVM

SEQ ID NO: 1654 - protein, 9 aa, Homo sapiens
FLAVMTQKM

SEQ ID NO: 1655 - protein, 10 aa, Homo sapiens
ISFNDFLAVM

SEQ ID NO: 1656 - protein, 10 aa, Homo sapiens
KRKVAPKPEL

SEQ ID NO: 1657 - protein, 8 aa, Homo sapiens
KVAPKPEL

SEQ ID NO: 1658 - protein, 9 aa, Homo sapiens
RKVAPKPEL

SEQ ID NO: 1659 - protein, 11 aa, Homo sapiens
WTAHAIIRDFY

SEQ ID NO: 1660 - protein, 12 aa, Homo sapiens
CWTAHAIIRDFY

SEQ ID NO: 1661 - protein, 10 aa, Homo sapiens
LVALFGLLVY

SEQ ID NO: 1662 - protein, 9 aa, Homo sapiens
PSEYPTKNY

SEQ ID NO: 1663 - protein, 8 aa, Homo sapiens
ALFGLLVY

SEQ ID NO: 1664 - protein, 9 aa, Homo sapiens
ALFGLLVYL

SEQ ID NO: 1665 - protein, 9 aa, Homo sapiens
VLTSGIVFV

SEQ ID NO: 1666 - protein, 9 aa, Homo sapiens
TLLGWVNGL

SEQ ID NO: 1667 - protein, 9 aa, Homo sapiens
TLIPVCWTA

SEQ ID NO: 1668 - protein, 9 aa, Homo sapiens
FVISGVLTL

SEQ ID NO: 1669 - protein, 9 aa, Homo sapiens
YMARYSTSA

SEQ ID NO: 1670 - protein, 9 aa, Homo sapiens
ALLVALFGL

SEQ ID NO: 1671 - protein, 10 aa, Homo sapiens
ALFGLLVYLA

SEQ ID NO: 1672 - protein, 12 aa, Homo sapiens
FVISGVLTLIPV

SEQ ID NO: 1673 - protein, 9 aa, Homo sapiens
ILGVVLTLL

SEQ ID NO: 1674 - protein, 9 aa, Homo sapiens
GLLVYLAGA

SEQ ID NO: 1675 - protein, 10 aa, Homo sapiens
LVSCALPMWK

SEQ ID NO: 1676 - protein, 9 aa, Homo sapiens
VSCALPMWK

SEQ ID NO: 1677 - protein, 10 aa, Homo sapiens
GLLVYLAGAK

SEQ ID NO: 1678 - protein, 9 aa, Homo sapiens
ALFGLLVYL

SEQ ID NO: 1679 - protein, 8 aa, Homo sapiens
ALFGLLVY

SEQ ID NO: 1680 - protein, 10 aa, Homo sapiens
LVALFGLLVY

SEQ ID NO: 1681 - protein, 9 aa, Homo sapiens
VSCALPMWK

SEQ ID NO: 1682 - protein, 9 aa, Homo sapiens
STSAPAISR

SEQ ID NO: 1683 - protein, 10 aa, Homo sapiens
LVSCALPMWK

SEQ ID NO: 1684 - protein, 9 aa, Homo sapiens
ALFGLLVYL

SEQ ID NO: 1685 - protein, 10 aa, Homo sapiens
MWKALLFLTL

SEQ ID NO: 1686 - protein, 9 aa, Homo sapiens
RYSTSAPAI

SEQ ID NO: 1687 - protein, 10 aa, Homo sapiens
LYLGWAASGL

SEQ ID NO: 1688 - protein, 9 aa, Homo sapiens
VIALLVALF

SEQ ID NO: 1689 - protein, 10 aa, Homo sapiens
VFVISGVLTL

SEQ ID NO: 1690 - protein, 9 aa, Homo sapiens
KARLVLTSG

SEQ ID NO: 1691 - protein, 10 aa, Homo sapiens
KARLVLTSGI

SEQ ID NO: 1692 - protein, 10 aa, Homo sapiens
MARYSTSAPA

SEQ ID NO: 1693 - protein, 9 aa, Homo sapiens
RGPSEYPTK

SEQ ID NO: 1694 - protein, 9 aa, Homo sapiens
ALFGLLVYL

SEQ ID NO: 1695 - protein, 9 aa, Homo sapiens
GVLTLIPVC

SEQ ID NO: 1696 - protein, 9 aa, Homo sapiens
STSAPAISR

SEQ ID NO: 1697 - protein, 10 aa, Homo sapiens
YSTSAPAISR

SEQ ID NO: 1698 - protein, 12 aa, Homo sapiens
FYNPLVAEAQKR

SEQ ID NO: 1699 - protein, 8 aa, Homo sapiens
TSAPAISR

SEQ ID NO: 1700 - protein, 8 aa, Homo sapiens
WTAHAIIR

SEQ ID NO: 1701 - protein, 9 aa, Homo sapiens
LPMWKVTAF

SEQ ID NO: 1702 - protein, 10 aa, Homo sapiens
ALPMWKVTAF

SEQ ID NO: 1703 - protein, 10 aa, Homo sapiens
LPMWKVTAFI

SEQ ID NO: 1704 - protein, 9 aa, Homo sapiens
LPMWKALLF

SEQ ID NO: 1705 - protein, 10 aa, Homo sapiens
LPMWKALLFL

SEQ ID NO: 1706 - protein, 9 aa, Homo sapiens
LPMWKVTAF

SEQ ID NO: 1707 - protein, 10 aa, Homo sapiens
LPMWKVTAFI

SEQ ID NO: 1708 - protein, 12 aa, Homo sapiens
LPMWKALLFLTL

SEQ ID NO: 1709 - protein, 8 aa, Homo sapiens
DSKARLVL

SEQ ID NO: 1710 - protein, 8 aa, Homo sapiens
VIALLVAL

SEQ ID NO: 1711 - protein, 10 aa, Homo sapiens
RALCVIALLV

SEQ ID NO: 1712 - protein, 9 aa, Homo sapiens
LTSGIVFVI

SEQ ID NO: 1713 - protein, 9 aa, Homo sapiens
SEYPTKNYV

SEQ ID NO: 1714 - protein, 9 aa, Homo sapiens
ALCVIALLV

SEQ ID NO: 1715 - protein, 9 aa, Homo sapiens
ALFGLLVYL

SEQ ID NO: 1716 - protein, 9 aa, Homo sapiens
VLTSGIVFV

SEQ ID NO: 1717 - protein, 9 aa, Homo sapiens
FVISGVLTL

SEQ ID NO: 1718 - protein, 9 aa, Homo sapiens
MASAGMQIL

SEQ ID NO: 1719 - protein, 9 aa, Homo sapiens
VALFGLLVY

SEQ ID NO: 1720 - protein, 9 aa, Homo sapiens
IIRDFYNPL

SEQ ID NO: 1721 - protein, 8 aa, Homo sapiens
ISRGPSEY

SEQ ID NO: 1722 - protein, 9 aa, Homo sapiens
TAHAIIRDF

SEQ ID NO: 1723 - protein, 9 aa, Homo sapiens
FVISGVLTL

SEQ ID NO: 1724 - protein, 9 aa, Homo sapiens
YLGWAASGL

SEQ ID NO: 1725 - protein, 9 aa, Homo sapiens
ALPMWKALL

SEQ ID NO: 1726 - protein, 8 aa, Homo sapiens
ALPMWKAL

SEQ ID NO: 1727 - protein, 10 aa, Homo sapiens
ALPMWKVTAF

SEQ ID NO: 1728 - protein, 9 aa, Homo sapiens
FVISGVLTL

SEQ ID NO: 1729 - protein, 9 aa, Homo sapiens
MASAGMQIL

SEQ ID NO: 1730 - protein, 9 aa, Homo sapiens
CALPMWKAL

SEQ ID NO: 1731 - protein, 8 aa, Homo sapiens
KALLFLTL

SEQ ID NO: 1732 - protein, 9 aa, Homo sapiens
LPMWKALLF

SEQ ID NO: 1733 - protein, 9 aa, Homo sapiens
RYSTSAPAI

SEQ ID NO: 1734 - protein, 9 aa, Homo sapiens
YLGWAASGL

SEQ ID NO: 1735 - protein, 8 aa, Homo sapiens
LFGLLVYL

SEQ ID NO: 1736 - protein, 9 aa, Homo sapiens
ILGVVLTLL

SEQ ID NO: 1737 - protein, 8 aa, Homo sapiens
VFVISGVL

SEQ ID NO: 1738 - protein, 9 aa, Homo sapiens
IRDFYNPLV

SEQ ID NO: 1739 - protein, 9 aa, Homo sapiens
FVISGVLTL

SEQ ID NO: 1740 - protein, 10 aa, Homo sapiens
ARYSTSAPAI

SEQ ID NO: 1741 - protein, 9 aa, Homo sapiens
RDFYNPLVA

SEQ ID NO: 1742 - protein, 8 aa, Homo sapiens
TSGIVFVI

SEQ ID NO: 1743 - protein, 8 aa, Homo sapiens
SRGPSEYP

SEQ ID NO: 1744 - protein, 9 aa, Homo sapiens
RYSTSAPAI

SEQ ID NO: 1745 - protein, 9 aa, Homo sapiens
FVISGVLTL

SEQ ID NO: 1746 - protein, 9 aa, Homo sapiens
IRDFYNPLV

SEQ ID NO: 1747 - protein, 9 aa, Homo sapiens
QKRELGASL

SEQ ID NO: 1748 - protein, 9 aa, Homo sapiens
SRGPSEYPT

SEQ ID NO: 1749 - protein, 10 aa, Homo sapiens
YTYDEYTKGY

SEQ ID NO: 1750 - protein, 10 aa, Homo sapiens
FTCQIPGIYY

SEQ ID NO: 1751 - protein, 9 aa, Homo sapiens
FTCQIPGIY

SEQ ID NO: 1752 - protein, 11 aa, Homo sapiens
MYTYDEYTKGY

SEQ ID NO: 1753 - protein, 8 aa, Homo sapiens
NAESNGLY

SEQ ID NO: 1754 - protein, 8 aa, Homo sapiens
GSDGKPGY

SEQ ID NO: 1755 - protein, 9 aa, Homo sapiens
LTENDQVWL

SEQ ID NO: 1756 - protein, 9 aa, Homo sapiens
GIYYFSYHV

SEQ ID NO: 1757 - protein, 9 aa, Homo sapiens
MLPQIPFLL

SEQ ID NO: 1758 - protein, 9 aa, Homo sapiens
NLVHGVFYA

SEQ ID NO: 1759 - protein, 9 aa, Homo sapiens
FLLLVSLNL

SEQ ID NO: 1760 - protein, 9 aa, Homo sapiens
LLLVSLNLV

SEQ ID NO: 1761 - protein, 10 aa, Homo sapiens
FLLLVSLNLV

SEQ ID NO: 1762 - protein, 9 aa, Homo sapiens
ILSKAYPAI

SEQ ID NO: 1763 - protein, 10 aa, Homo sapiens
MLPQIPFLLL

SEQ ID NO: 1764 - protein, 11 aa, Homo sapiens
MLPQIPFLLLV

SEQ ID NO: 1765 - protein, 9 aa, Homo sapiens
GLYKNGTPV

SEQ ID NO: 1766 - protein, 11 aa, Homo sapiens
GLDGPKGNPGL

SEQ ID NO: 1767 - protein, 10 aa, Homo sapiens
SLSGTPLVSA

SEQ ID NO: 1768 - protein, 8 aa, Homo sapiens
SLSGTPLV

SEQ ID NO: 1769 - protein, 8 aa, Homo sapiens
GLYSSEYV

SEQ ID NO: 1770 - protein, 10 aa, Homo sapiens
GLPGPPGPSA

SEQ ID NO: 1771 - protein, 10 aa, Homo sapiens
GTHVWVGLYK

SEQ ID NO: 1772 - protein, 10 aa, Homo sapiens
VMYTYDEYTK

SEQ ID NO: 1773 - protein, 10 aa, Homo sapiens
VSAFTVILSK

SEQ ID NO: 1774 - protein, 9 aa, Homo sapiens
SAFTVILSK

SEQ ID NO: 1775 - protein, 10 aa, Homo sapiens
AIGTPIPFDK

SEQ ID NO: 1776 - protein, 9 aa, Homo sapiens
AVMPEGFIK

SEQ ID NO: 1777 - protein, 11 aa, Homo sapiens
GLYKNGTPVMY

SEQ ID NO: 1778 - protein, 9 aa, Homo sapiens
AVMPEGFIK

SEQ ID NO: 1779 - protein, 9 aa, Homo sapiens
SAFTVILSK

SEQ ID NO: 1780 - protein, 10 aa, Homo sapiens
GTHVWVGLYK

SEQ ID NO: 1781 - protein, 10 aa, Homo sapiens
VSAFTVILSK

SEQ ID NO: 1782 - protein, 9 aa, Homo sapiens
CQIPGIYYF

SEQ ID NO: 1783 - protein, 9 aa, Homo sapiens
YYFSYHVHV

SEQ ID NO: 1784 - protein, 9 aa, Homo sapiens
MLPQIPFLL

SEQ ID NO: 1785 - protein, 10 aa, Homo sapiens
EYVHSSFSGF

SEQ ID NO: 1786 - protein, 9 aa, Homo sapiens
HYDPRTGIF

SEQ ID NO: 1787 - protein, 9 aa, Homo sapiens
IGPPGIPGF

SEQ ID NO: 1788 - protein, 11 aa, Homo sapiens
AYPAIGTPIPF

SEQ ID NO: 1789 - protein, 9 aa, Homo sapiens
KTQFFIPYT

SEQ ID NO: 1790 - protein, 10 aa, Homo sapiens
KTQFFIPYTI

SEQ ID NO: 1791 - protein, 9 aa, Homo sapiens
RYQMPTGIK

SEQ ID NO: 1792 - protein, 9 aa, Homo sapiens
SAFTVILSK

SEQ ID NO: 1793 - protein, 9 aa, Homo sapiens
HVKGTHVWV

SEQ ID NO: 1794 - protein, 10 aa, Homo sapiens
LVHGVFYAER

SEQ ID NO: 1795 - protein, 10 aa, Homo sapiens
YYFSYHVHVK

SEQ ID NO: 1796 - protein, 10 aa, Homo sapiens
YNRQQHYDPR

SEQ ID NO: 1797 - protein, 10 aa, Homo sapiens
TIKSKGIAVR

SEQ ID NO: 1798 - protein, 10 aa, Homo sapiens
IPFDKILYNR

SEQ ID NO: 1799 - protein, 9 aa, Homo sapiens
PFDKILYNR

SEQ ID NO: 1800 - protein, 11 aa, Homo sapiens
YTIKSKGIAVR

SEQ ID NO: 1801 - protein, 9 aa, Homo sapiens
RPSLSGTPL

SEQ ID NO: 1802 - protein, 9 aa, Homo sapiens
MPTGIKGPL

SEQ ID NO: 1803 - protein, 10 aa, Homo sapiens
RPSLSGTPLV

SEQ ID NO: 1804 - protein, 10 aa, Homo sapiens
QRPSLSGTPL

SEQ ID NO: 1805 - protein, 9 aa, Homo sapiens
LPQIPFLLL

SEQ ID NO: 1806 - protein, 9 aa, Homo sapiens
IPFLLLVSL

SEQ ID NO: 1807 - protein, 10 aa, Homo sapiens
LPGPPGPSAV

SEQ ID NO: 1808 - protein, 10 aa, Homo sapiens
FIKAGQRPSL

SEQ ID NO: 1809 - protein, 9 aa, Homo sapiens
TIKSKGIAV

SEQ ID NO: 1810 - protein, 10 aa, Homo sapiens
YTIKSKGIAV

SEQ ID NO: 1811 - protein, 9 aa, Homo sapiens
VILSKAYPA

SEQ ID NO: 1812 - protein, 9 aa, Homo sapiens
IPFLLLVSL

SEQ ID NO: 1813 - protein, 9 aa, Homo sapiens
HVHVKGTHV

SEQ ID NO: 1814 - protein, 8 aa, Homo sapiens
LPNTKTQF

SEQ ID NO: 1815 - protein, 9 aa, Homo sapiens
TQFFIPYTI

SEQ ID NO: 1816 - protein, 10 aa, Homo sapiens
KTQFFIPYTI

SEQ ID NO: 1817 - protein, 10 aa, Homo sapiens
LPQIPFLLLV

SEQ ID NO: 1818 - protein, 9 aa, Homo sapiens
HSSFSGFLV

SEQ ID NO: 1819 - protein, 9 aa, Homo sapiens
PQIPFLLLV

SEQ ID NO: 1820 - protein, 9 aa, Homo sapiens
GIYYFSYHV

SEQ ID NO: 1821 - protein, 9 aa, Homo sapiens
GLYKNGTPV

SEQ ID NO: 1822 - protein, 10 aa, Homo sapiens
YPAIGTPIPF

SEQ ID NO: 1823 - protein, 9 aa, Homo sapiens
FSGFLVAPM

SEQ ID NO: 1824 - protein, 9 aa, Homo sapiens
YVHSSFSGF

SEQ ID NO: 1825 - protein, 9 aa, Homo sapiens
FTVILSKAY

SEQ ID NO: 1826 - protein, 9 aa, Homo sapiens
ILYNRQQHY

SEQ ID NO: 1827 - protein, 9 aa, Homo sapiens
TIKSKGIAV

SEQ ID NO: 1828 - protein, 9 aa, Homo sapiens
SAIIDLTEN

SEQ ID NO: 1829 - protein, 9 aa, Homo sapiens
PAIGTPIPF

SEQ ID NO: 1830 - protein, 9 aa, Homo sapiens
MLPQIPFLL

SEQ ID NO: 1831 - protein, 9 aa, Homo sapiens
FSGFLVAPM

SEQ ID NO: 1832 - protein, 10 aa, Homo sapiens
MLPQIPFLLL

SEQ ID NO: 1833 - protein, 9 aa, Homo sapiens
ILSKAYPAI

SEQ ID NO: 1834 - protein, 9 aa, Homo sapiens
VGPAGAKGM

SEQ ID NO: 1835 - protein, 9 aa, Homo sapiens
PGPPGPSAV

SEQ ID NO: 1836 - protein, 9 aa, Homo sapiens
FIPYTIKSK

SEQ ID NO: 1837 - protein, 8 aa, Homo sapiens
MLPQIPFL

SEQ ID NO: 1838 - protein, 9 aa, Homo sapiens
FSGFLVAPM

SEQ ID NO: 1839 - protein, 10 aa, Homo sapiens
YPAIGTPIPF

SEQ ID NO: 1840 - protein, 9 aa, Homo sapiens
YVHSSFSGF

SEQ ID NO: 1841 - protein, 9 aa, Homo sapiens
SANQGVTGM

SEQ ID NO: 1842 - protein, 9 aa, Homo sapiens
MPVSAFTVI

SEQ ID NO: 1843 - protein, 9 aa, Homo sapiens
FLLLVSLNL

SEQ ID NO: 1844 - protein, 9 aa, Homo sapiens
KGIPGSHGL

SEQ ID NO: 1845 - protein, 9 aa, Homo sapiens
FGKPGLPGL

SEQ ID NO: 1846 - protein, 8 aa, Homo sapiens
VSAFTVIL

SEQ ID NO: 1847 - protein, 9 aa, Homo sapiens
HYDPRTGIF

SEQ ID NO: 1848 - protein, 9 aa, Homo sapiens
MLPQIPFLL

SEQ ID NO: 1849 - protein, 10 aa, Homo sapiens
QHYDPRTGIF

SEQ ID NO: 1850 - protein, 10 aa, Homo sapiens
TYDEYTKGYL

SEQ ID NO: 1851 - protein, 8 aa, Homo sapiens
HYDPRTGI

SEQ ID NO: 1852 - protein, 9 aa, Homo sapiens
KGDVGPAGL

SEQ ID NO: 1853 - protein, 9 aa, Homo sapiens
YYFSYHVHV

SEQ ID NO: 1854 - protein, 9 aa, Homo sapiens
ERYQMPTGI

SEQ ID NO: 1855 - protein, 9 aa, Homo sapiens
LYKNGTPVM

SEQ ID NO: 1856 - protein, 9 aa, Homo sapiens
HYDPRTGIF

SEQ ID NO: 1857 - protein, 9 aa, Homo sapiens
CQIPGIYYF

SEQ ID NO: 1858 - protein, 9 aa, Homo sapiens
SNGLYSSEY

SEQ ID NO: 1859 - protein, 9 aa, Homo sapiens
SSFSGFLVA

SEQ ID NO: 1860 - protein, 8 aa, Homo sapiens
IPFDKILY

SEQ ID NO: 1861 - protein, 9 aa, Homo sapiens
YYFSYHVHV

SEQ ID NO: 1862 - protein, 9 aa, Homo sapiens
HYDPRTGIF

SEQ ID NO: 1863 - protein, 9 aa, Homo sapiens
LYKNGTPVM

SEQ ID NO: 1864 - protein, 9 aa, Homo sapiens
VFYAERYQM

SEQ ID NO: 1865 - protein, 9 aa, Homo sapiens
YKNGTPVMY

SEQ ID NO: 1866 - protein, 9 aa, Homo sapiens
NGTPVMYTY

SEQ ID NO: 1867 - protein, 8 aa, Homo sapiens
FYAERYQM

SEQ ID NO: 1868 - protein, 8 aa, Homo sapiens
QVDWSRLY

SEQ ID NO: 1869 - protein, 9 aa, Homo sapiens
VSSLLACLH

SEQ ID NO: 1870 - protein, 9 aa, Homo sapiens
ATTVSSLLA

SEQ ID NO: 1871 - protein, 9 aa, Homo sapiens
QVDWSRLYR

SEQ ID NO: 1872 - protein, 9 aa, Homo sapiens
YRDTGLVKM

SEQ ID NO: 1873 - protein, 9 aa, Homo sapiens
RLYRDTGLV

SEQ ID NO: 1874 - protein, 10 aa, Homo sapiens
TTACWPAFTV

SEQ ID NO: 1875 - protein, 9 aa, Homo sapiens
TVSSLLACL

SEQ ID NO: 1876 - protein, 10 aa, Homo sapiens
SLLACLHCPG

SEQ ID NO: 1877 - protein, 10 aa, Homo sapiens
MSATTACWPA

SEQ ID NO: 1878 - protein, 9 aa, Homo sapiens
SLLACLHCP

SEQ ID NO: 1879 - protein, 10 aa, Homo sapiens
HPLIPGPEAL

SEQ ID NO: 1880 - protein, 10 aa, Homo sapiens
SRLYRDTGLV

SEQ ID NO: 1881 - protein, 9 aa, Homo sapiens
TACWPAFTV

SEQ ID NO: 1882 - protein, 9 aa, Homo sapiens
PLIPGPEAL

SEQ ID NO: 1883 - protein, 10 aa, Homo sapiens
VLGEARGDQV

SEQ ID NO: 1884 - protein, 8 aa, Homo sapiens
PLIPGPEA

SEQ ID NO: 1885 - protein, 9 aa, Homo sapiens
ACWPAFTVL

SEQ ID NO: 1886 - protein, 8 aa, Homo sapiens
RLYRDTGL

SEQ ID NO: 1887 - protein, 11 aa, Homo sapiens
RLYRDTGLVKM

SEQ ID NO: 1888 - protein, 9 aa, Homo sapiens
YRDTGLVKM

SEQ ID NO: 1889 - protein, 10 aa, Homo sapiens
RLYRDTGLVK

SEQ ID NO: 1890 - protein, 11 aa, Homo sapiens
SRLYRDTGLVK

SEQ ID NO: 1891 - protein, 12 aa, Homo sapiens
WSRLYRDTGLVK

SEQ ID NO: 1892 - protein, 11 aa, Homo sapiens
PLIPGPEALSK

SEQ ID NO: 1893 - protein, 10 aa, Homo sapiens
LIPGPEALSK

SEQ ID NO: 1894 - protein, 10 aa, Homo sapiens
FSNNHPSTPK

SEQ ID NO: 1895 - protein, 9 aa, Homo sapiens
QVDWSRLYR

SEQ ID NO: 1896 - protein, 10 aa, Homo sapiens
RLYRDTGLVK

SEQ ID NO: 1897 - protein, 10 aa, Homo sapiens
LIPGPEALSK

SEQ ID NO: 1898 - protein, 9 aa, Homo sapiens
TTVSSLLAC

SEQ ID NO: 1899 - protein, 8 aa, Homo sapiens
CWPAFTVL

SEQ ID NO: 1900 - protein, 9 aa, Homo sapiens
CWPAFTVLG

SEQ ID NO: 1901 - protein, 9 aa, Homo sapiens
ATTACWPAF

SEQ ID NO: 1902 - protein, 9 aa, Homo sapiens
NHPSTPKRF

SEQ ID NO: 1903 - protein, 9 aa, Homo sapiens
PLIPGPEAL

SEQ ID NO: 1904 - protein, 9 aa, Homo sapiens
ACWPAFTVL

SEQ ID NO: 1905 - protein, 9 aa, Homo sapiens
MSRKPRASS

SEQ ID NO: 1906 - protein, 9 aa, Homo sapiens
RGRGKHPLI

SEQ ID NO: 1907 - protein, 10 aa, Homo sapiens
RLYRDTGLVK

SEQ ID NO: 1908 - protein, 9 aa, Homo sapiens
REKGPVKEV

SEQ ID NO: 1909 - protein, 9 aa, Homo sapiens
LYRDTGLVK

SEQ ID NO: 1910 - protein, 9 aa, Homo sapiens
PVKEVPGTK

SEQ ID NO: 1911 - protein, 10 aa, Homo sapiens
HPSTPKRFPR

SEQ ID NO: 1912 - protein, 9 aa, Homo sapiens
QVDWSRLYR

SEQ ID NO: 1913 - protein, 9 aa, Homo sapiens
LVKMSRKPR

SEQ ID NO: 1914 - protein, 9 aa, Homo sapiens
DTGLVKMSR

SEQ ID NO: 1915 - protein, 10 aa, Homo sapiens
DQVDWSRLYR

SEQ ID NO: 1916 - protein, 10 aa, Homo sapiens
HPLIPGPEAL

SEQ ID NO: 1917 - protein, 8 aa, Homo sapiens
KPRASSPF

SEQ ID NO: 1918 - protein, 12 aa, Homo sapiens
FPRQPKREKGPV

SEQ ID NO: 1919 - protein, 9 aa, Homo sapiens
ACWPAFTVL

SEQ ID NO: 1920 - protein, 12 aa, Homo sapiens
TPKRRGRGKHPL

SEQ ID NO: 1921 - protein, 10 aa, Homo sapiens
WSRLYRDTGL

SEQ ID NO: 1922 - protein, 10 aa, Homo sapiens
SRKPRASSPF

SEQ ID NO: 1923 - protein, 8 aa, Homo sapiens
SATTVSSL

SEQ ID NO: 1924 - protein, 10 aa, Homo sapiens
HPLIPGPEAL

SEQ ID NO: 1925 - protein, 9 aa, Homo sapiens
PLIPGPEAL

SEQ ID NO: 1926 - protein, 9 aa, Homo sapiens
TACWPAFTV

SEQ ID NO: 1927 - protein, 10 aa, Homo sapiens
TTACWPAFTV

SEQ ID NO: 1928 - protein, 10 aa, Homo sapiens
MSATTACWPA

SEQ ID NO: 1929 - protein, 9 aa, Homo sapiens
RLYRDTGLV

SEQ ID NO: 1930 - protein, 9 aa, Homo sapiens
REKGPVKEV

SEQ ID NO: 1931 - protein, 8 aa, Homo sapiens
ACWPAFTV

SEQ ID NO: 1932 - protein, 9 aa, Homo sapiens
MSATTVSSL

SEQ ID NO: 1933 - protein, 10 aa, Homo sapiens
MSATTVSSLL

SEQ ID NO: 1934 - protein, 12 aa, Homo sapiens
FSNNHPSTPKRF

SEQ ID NO: 1935 - protein, 9 aa, Homo sapiens
PLIPGPEAL

SEQ ID NO: 1936 - protein, 9 aa, Homo sapiens
FSNNHPSTP

SEQ ID NO: 1937 - protein, 8 aa, Homo sapiens
PLIPGPEA

SEQ ID NO: 1938 - protein, 9 aa, Homo sapiens
MSATTVSSL

SEQ ID NO: 1939 - protein, 9 aa, Homo sapiens
SATTVSSLL

SEQ ID NO: 1940 - protein, 9 aa, Homo sapiens
TVSSLLACL

SEQ ID NO: 1941 - protein, 8 aa, Homo sapiens
LIPGPEAL

SEQ ID NO: 1942 - protein, 8 aa, Homo sapiens
CWPAFTVL

SEQ ID NO: 1943 - protein, 8 aa, Homo sapiens
SATTVSSL

SEQ ID NO: 1944 - protein, 9 aa, Homo sapiens
MSATTVSSL

SEQ ID NO: 1945 - protein, 9 aa, Homo sapiens
SATTVSSLL

SEQ ID NO: 1946 - protein, 10 aa, Homo sapiens
MSATTVSSLL

SEQ ID NO: 1947 - protein, 9 aa, Homo sapiens
ACWPAFTVL

SEQ ID NO: 1948 - protein, 10 aa, Homo sapiens
TACWPAFTVL

SEQ ID NO: 1949 - protein, 9 aa, Homo sapiens
YRDTGLVKM

SEQ ID NO: 1950 - protein, 10 aa, Homo sapiens
LYRDTGLVKM

SEQ ID NO: 1951 - protein, 9 aa, Homo sapiens
MSATTVSSL

SEQ ID NO: 1952 - protein, 8 aa, Homo sapiens
CWPAFTVL

SEQ ID NO: 1953 - protein, 8 aa, Homo sapiens
LIPGPEAL

SEQ ID NO: 1954 - protein, 9 aa, Homo sapiens
YRDTGLVKM

SEQ ID NO: 1955 - protein, 9 aa, Homo sapiens
SRLYRDTGL

SEQ ID NO: 1956 - protein, 9 aa, Homo sapiens
MSATTVSSL

SEQ ID NO: 1957 - protein, 9 aa, Homo sapiens
RRGRGKHPL

SEQ ID NO: 1958 - protein, 9 aa, Homo sapiens
TVLGEARGD

SEQ ID NO: 1959 - protein, 9 aa, Homo sapiens
YRDTGLVKM

SEQ ID NO: 1960 - protein, 9 aa, Homo sapiens
SRLYRDTGL

SEQ ID NO: 1961 - protein, 10 aa, Homo sapiens
LYRDTGLVKM

SEQ ID NO: 1962 - protein, 9 aa, Homo sapiens
ACWPAFTVL

SEQ ID NO: 1963 - protein, 9 aa, Homo sapiens
SRKPRASSP

SEQ ID NO: 1964 - protein, 9 aa, Homo sapiens
CSAVFHERY

SEQ ID NO: 1965 - protein, 10 aa, Homo sapiens
YSAAELKCRY

SEQ ID NO: 1966 - protein, 10 aa, Homo sapiens
YCSAVFHERY

SEQ ID NO: 1967 - protein, 9 aa, Homo sapiens
AISIQQELY

SEQ ID NO: 1968 - protein, 9 aa, Homo sapiens
RSDEIVLTV

SEQ ID NO: 1969 - protein, 8 aa, Homo sapiens
PSEESEKY

SEQ ID NO: 1970 - protein, 9 aa, Homo sapiens
ITDARHHAW

SEQ ID NO: 1971 - protein, 9 aa, Homo sapiens
KSDLRFLGL

SEQ ID NO: 1972 - protein, 10 aa, Homo sapiens
FLVEMGFYHV

SEQ ID NO: 1973 - protein, 9 aa, Homo sapiens
MMLVSAWLL

SEQ ID NO: 1974 - protein, 9 aa, Homo sapiens
FLDLKLHGI

SEQ ID NO: 1975 - protein, 9 aa, Homo sapiens
ILWVGNSEV

SEQ ID NO: 1976 - protein, 9 aa, Homo sapiens
ILVEAAVQV

SEQ ID NO: 1977 - protein, 11 aa, Homo sapiens
LFLVEMGFYHV

SEQ ID NO: 1978 - protein, 9 aa, Homo sapiens
LLFIGTIKV

SEQ ID NO: 1979 - protein, 9 aa, Homo sapiens
RMMLVSAWL

SEQ ID NO: 1980 - protein, 12 aa, Homo sapiens
LLFLVEMGFYHV

SEQ ID NO: 1981 - protein, 10 aa, Homo sapiens
RMMLVSAWLL

SEQ ID NO: 1982 - protein, 9 aa, Homo sapiens
GLIPTVLTL

SEQ ID NO: 1983 - protein, 9 aa, Homo sapiens
KLHGILVEA

SEQ ID NO: 1984 - protein, 11 aa, Homo sapiens
FLVEMGFYHVS

SEQ ID NO: 1985 - protein, 10 aa, Homo sapiens
WILWVGNSEV

SEQ ID NO: 1986 - protein, 10 aa, Homo sapiens
KLLFIGTIKV

SEQ ID NO: 1987 - protein, 11 aa, Homo sapiens
SLAETTGLIKL

SEQ ID NO: 1988 - protein, 9 aa, Homo sapiens
VLEEEVELV

SEQ ID NO: 1989 - protein, 9 aa, Homo sapiens
SVLEEEVEL

SEQ ID NO: 1990 - protein, 9 aa, Homo sapiens
WLIVLLFLV

SEQ ID NO: 1991 - protein, 10 aa, Homo sapiens
SVLEEEVELV

SEQ ID NO: 1992 - protein, 9 aa, Homo sapiens
ILQKHGENV

SEQ ID NO: 1993 - protein, 10 aa, Homo sapiens
RMSSFNRHMK

SEQ ID NO: 1994 - protein, 9 aa, Homo sapiens
KQAFYYSYK

SEQ ID NO: 1995 - protein, 10 aa, Homo sapiens
GTMKIHILQK

SEQ ID NO: 1996 - protein, 9 aa, Homo sapiens
VTNSRICYK

SEQ ID NO: 1997 - protein, 10 aa, Homo sapiens
RICYKQAFYY

SEQ ID NO: 1998 - protein, 10 aa, Homo sapiens
GLIPTVLTLK

SEQ ID NO: 1999 - protein, 9 aa, Homo sapiens
ANFIPTVYK

SEQ ID NO: 2000 - protein, 10 aa, Homo sapiens
SLAETTGLIK

SEQ ID NO: 2001 - protein, 9 aa, Homo sapiens
KLLFIGTIK

SEQ ID NO: 2002 - protein, 9 aa, Homo sapiens
SLLQGPLCR

SEQ ID NO: 2003 - protein, 10 aa, Homo sapiens
GTMKIHILQK

SEQ ID NO: 2004 - protein, 9 aa, Homo sapiens
VTNSRICYK

SEQ ID NO: 2005 - protein, 10 aa, Homo sapiens
SVTNSRICYK

SEQ ID NO: 2006 - protein, 9 aa, Homo sapiens
KQAFYYSYK

SEQ ID NO: 2007 - protein, 9 aa, Homo sapiens
SVLSEQFTK

SEQ ID NO: 2008 - protein, 9 aa, Homo sapiens
ANFIPTVYK

SEQ ID NO: 2009 - protein, 9 aa, Homo sapiens
KYILTLQTV

SEQ ID NO: 2010 - protein, 10 aa, Homo sapiens
KYASVEVKPF

SEQ ID NO: 2011 - protein, 11 aa, Homo sapiens
KYILTLQTVHF

SEQ ID NO: 2012 - protein, 10 aa, Homo sapiens
KYQCPHCATI

SEQ ID NO: 2013 - protein, 10 aa, Homo sapiens
KWSGLKPQTF

SEQ ID NO: 2014 - protein, 10 aa, Homo sapiens
IYAGNNMHSL

SEQ ID NO: 2015 - protein, 12 aa, Homo sapiens
LYSPQEMEVLQF

SEQ ID NO: 2016 - protein, 11 aa, Homo sapiens
IYAGNNMHSLL

SEQ ID NO: 2017 - protein, 9 aa, Homo sapiens
RVHMRNLHA

SEQ ID NO: 2018 - protein, 9 aa, Homo sapiens
RTKEQLFFV

SEQ ID NO: 2019 - protein, 9 aa, Homo sapiens
RTHSEATSK

SEQ ID NO: 2020 - protein, 9 aa, Homo sapiens
KQAFYYSYK

SEQ ID NO: 2021 - protein, 9 aa, Homo sapiens
HMKTHTSEK

SEQ ID NO: 2022 - protein, 9 aa, Homo sapiens
STKNQRKTK

SEQ ID NO: 2023 - protein, 9 aa, Homo sapiens
TMKIHILQK

SEQ ID NO: 2024 - protein, 9 aa, Homo sapiens
RFKCKHCSY

SEQ ID NO: 2025 - protein, 9 aa, Homo sapiens
FSRWINLHR

SEQ ID NO: 2026 - protein, 9 aa, Homo sapiens
TFRTVTLLR

SEQ ID NO: 2027 - protein, 9 aa, Homo sapiens
DVCMFTSSR

SEQ ID NO: 2028 - protein, 9 aa, Homo sapiens
SSRMSSFNR

SEQ ID NO: 2029 - protein, 12 aa, Homo sapiens
MFTSSRMSSFNR

SEQ ID NO: 2030 - protein, 9 aa, Homo sapiens
ETYNQGRRR

SEQ ID NO: 2031 - protein, 11 aa, Homo sapiens
DCLQMLQVWQR

SEQ ID NO: 2032 - protein, 9 aa, Homo sapiens
TYNQGRRRR

SEQ ID NO: 2033 - protein, 9 aa, Homo sapiens
EKNQLLAER

SEQ ID NO: 2034 - protein, 9 aa, Homo sapiens
KPHLCHLCL

SEQ ID NO: 2035 - protein, 12 aa, Homo sapiens
HPKAGLGPEDPL

SEQ ID NO: 2036 - protein, 10 aa, Homo sapiens
RPYKCNDCNM

SEQ ID NO: 2037 - protein, 12 aa, Homo sapiens
RPYKCNDCNMAF

SEQ ID NO: 2038 - protein, 11 aa, Homo sapiens
IPRCKFHPDCL

SEQ ID NO: 2039 - protein, 9 aa, Homo sapiens
QPGPGLLWL

SEQ ID NO: 2040 - protein, 8 aa, Homo sapiens
SPQEMEVL

SEQ ID NO: 2041 - protein, 8 aa, Homo sapiens
GPGSGPLL

SEQ ID NO: 2042 - protein, 10 aa, Homo sapiens
GPGSGPLLRL

SEQ ID NO: 2043 - protein, 11 aa, Homo sapiens
MLQVWQRLFPL

SEQ ID NO: 2044 - protein, 10 aa, Homo sapiens
CLKTFRTVTL

SEQ ID NO: 2045 - protein, 9 aa, Homo sapiens
QVWQRLFPL

SEQ ID NO: 2046 - protein, 9 aa, Homo sapiens
ELKCRYCSA

SEQ ID NO: 2047 - protein, 11 aa, Homo sapiens
IPRCKFHPDCL

SEQ ID NO: 2048 - protein, 9 aa, Homo sapiens
CSMCKYASV

SEQ ID NO: 2049 - protein, 8 aa, Homo sapiens
EATSKRSL

SEQ ID NO: 2050 - protein, 9 aa, Homo sapiens
EQFTKIKEL

SEQ ID NO: 2051 - protein, 8 aa, Homo sapiens
DSKLAVSL

SEQ ID NO: 2052 - protein, 9 aa, Homo sapiens
TIIARKSDL

SEQ ID NO: 2053 - protein, 8 aa, Homo sapiens
DLKLHGIL

SEQ ID NO: 2054 - protein, 9 aa, Homo sapiens
HDANFIPTV

SEQ ID NO: 2055 - protein, 9 aa, Homo sapiens
LQQCVAISI

SEQ ID NO: 2056 - protein, 10 aa, Homo sapiens
KQAFYYSYKI

SEQ ID NO: 2057 - protein, 9 aa, Homo sapiens
QAFYYSYKI

SEQ ID NO: 2058 - protein, 10 aa, Homo sapiens
YHDANFIPTV

SEQ ID NO: 2059 - protein, 9 aa, Homo sapiens
YQCPHCATI

SEQ ID NO: 2060 - protein, 9 aa, Homo sapiens
QQQEGVQVV

SEQ ID NO: 2061 - protein, 9 aa, Homo sapiens
GLIPTVLTL

SEQ ID NO: 2062 - protein, 9 aa, Homo sapiens
RSDEIVLTV

SEQ ID NO: 2063 - protein, 9 aa, Homo sapiens
GFSRWILWV

SEQ ID NO: 2064 - protein, 9 aa, Homo sapiens
FTSSRMSSF

SEQ ID NO: 2065 - protein, 9 aa, Homo sapiens
YASVEVKPF

SEQ ID NO: 2066 - protein, 9 aa, Homo sapiens
YAGNNMHSL

SEQ ID NO: 2067 - protein, 9 aa, Homo sapiens
MAATEISVL

SEQ ID NO: 2068 - protein, 10 aa, Homo sapiens
HDANFIPTVY

SEQ ID NO: 2069 - protein, 9 aa, Homo sapiens
VAISIQQEL

SEQ ID NO: 2070 - protein, 9 aa, Homo sapiens
KCNDCNMAF

SEQ ID NO: 2071 - protein, 9 aa, Homo sapiens
FSRWITSKW

SEQ ID NO: 2072 - protein, 9 aa, Homo sapiens
RFKCKHCSY

SEQ ID NO: 2073 - protein, 9 aa, Homo sapiens
DANFIPTVY

SEQ ID NO: 2074 - protein, 9 aa, Homo sapiens
FTSSRMSSF

SEQ ID NO: 2075 - protein, 9 aa, Homo sapiens
YAGNNMHSL

SEQ ID NO: 2076 - protein, 9 aa, Homo sapiens
YSPQEMEVL

SEQ ID NO: 2077 - protein, 9 aa, Homo sapiens
MAATEISVL

SEQ ID NO: 2078 - protein, 9 aa, Homo sapiens
SAHRNLCLL

SEQ ID NO: 2079 - protein, 9 aa, Homo sapiens
FTQSGTMKI

SEQ ID NO: 2080 - protein, 8 aa, Homo sapiens
LIPTVLTL

SEQ ID NO: 2081 - protein, 9 aa, Homo sapiens
FHPDCLQML

SEQ ID NO: 2082 - protein, 9 aa, Homo sapiens
GGPGSGPLL

SEQ ID NO: 2083 - protein, 9 aa, Homo sapiens
MAATEISVL

SEQ ID NO: 2084 - protein, 9 aa, Homo sapiens
YAGNNMHSL

SEQ ID NO: 2085 - protein, 9 aa, Homo sapiens
VAISIQQEL

SEQ ID NO: 2086 - protein, 9 aa, Homo sapiens
YASVEASKL

SEQ ID NO: 2087 - protein, 9 aa, Homo sapiens
YASVEVKPF

SEQ ID NO: 2088 - protein, 8 aa, Homo sapiens
FTSEAVEL

SEQ ID NO: 2089 - protein, 8 aa, Homo sapiens
AATEISVL

SEQ ID NO: 2090 - protein, 8 aa, Homo sapiens
HAYSAAEL

SEQ ID NO: 2091 - protein, 11 aa, Homo sapiens
YHDANFIPTVY

SEQ ID NO: 2092 - protein, 10 aa, Homo sapiens
YHDANFIPTV

SEQ ID NO: 2093 - protein, 9 aa, Homo sapiens
HHAWLIVLL

SEQ ID NO: 2094 - protein, 9 aa, Homo sapiens
VQQPGPGLL

SEQ ID NO: 2095 - protein, 9 aa, Homo sapiens
LHAYSAAEL

SEQ ID NO: 2096 - protein, 9 aa, Homo sapiens
HFTSEAVEL

SEQ ID NO: 2097 - protein, 8 aa, Homo sapiens
VLEEEVEL

SEQ ID NO: 2098 - protein, 8 aa, Homo sapiens
FTSEAVEL

SEQ ID NO: 2099 - protein, 8 aa, Homo sapiens
TFRTVTLL

SEQ ID NO: 2100 - protein, 8 aa, Homo sapiens
HAWLIVLL

SEQ ID NO: 2101 - protein, 9 aa, Homo sapiens
TRFTQSGTM

SEQ ID NO: 2102 - protein, 9 aa, Homo sapiens
FRKYHDANF

SEQ ID NO: 2103 - protein, 9 aa, Homo sapiens
MRTHSGVHM

SEQ ID NO: 2104 - protein, 9 aa, Homo sapiens
SRICYKQAF

SEQ ID NO: 2105 - protein, 10 aa, Homo sapiens
FRKYHDANFI

SEQ ID NO: 2106 - protein, 8 aa, Homo sapiens
CRYCSAVF

SEQ ID NO: 2107 - protein, 9 aa, Homo sapiens
RRGSRRVTW

SEQ ID NO: 2108 - protein, 8 aa, Homo sapiens
ERSDEIVL

SEQ ID NO: 2109 - protein, 9 aa, Homo sapiens
HRSPSELEA

SEQ ID NO: 2110 - protein, 9 aa, Homo sapiens
FRKYHDANF

SEQ ID NO: 2111 - protein, 9 aa, Homo sapiens
SRICYKQAF

SEQ ID NO: 2112 - protein, 9 aa, Homo sapiens
FHPDCLQML

SEQ ID NO: 2113 - protein, 9 aa, Homo sapiens
FYYSYKIYA

SEQ ID NO: 2114 - protein, 9 aa, Homo sapiens
VHMRNLHAY

SEQ ID NO: 2115 - protein, 9 aa, Homo sapiens
HHAWLIVLL

SEQ ID NO: 2116 - protein, 9 aa, Homo sapiens
YKQAFYYSY

SEQ ID NO: 2117 - protein, 10 aa, Homo sapiens
ARHHAWLIVL

SEQ ID NO: 2118 - protein, 8 aa, Homo sapiens
FYYSYKIY

SEQ ID NO: 2119 - protein, 9 aa, Homo sapiens
MRTHSGVHM

SEQ ID NO: 2120 - protein, 11 aa, Homo sapiens
HSWPWQISLQY

SEQ ID NO: 2121 - protein, 9 aa, Homo sapiens
YIDWINEKM

SEQ ID NO: 2122 - protein, 9 aa, Homo sapiens
RIDWWGFRV

SEQ ID NO: 2123 - protein, 9 aa, Homo sapiens
LSDTIQVAC

SEQ ID NO: 2124 - protein, 10 aa, Homo sapiens
LLPKDYPCYV

SEQ ID NO: 2125 - protein, 9 aa, Homo sapiens
KLQQGLQPV

SEQ ID NO: 2126 - protein, 11 aa, Homo sapiens
SLLPKDYPCYV

SEQ ID NO: 2127 - protein, 9 aa, Homo sapiens
TLIASNFVL

SEQ ID NO: 2128 - protein, 10 aa, Homo sapiens
MLGITVLAAL

SEQ ID NO: 2129 - protein, 10 aa, Homo sapiens
CQLENGSWEV

SEQ ID NO: 2130 - protein, 9 aa, Homo sapiens
ALIKLAEHV

SEQ ID NO: 2131 - protein, 9 aa, Homo sapiens
LLLRNDIAL

SEQ ID NO: 2132 - protein, 12 aa, Homo sapiens
DSLLPKDYPCYV

SEQ ID NO: 2133 - protein, 8 aa, Homo sapiens
KLAEHVEL

SEQ ID NO: 2134 - protein, 11 aa, Homo sapiens
SLFVGVDTIHV

SEQ ID NO: 2135 - protein, 9 aa, Homo sapiens
GLQPVVDHA

SEQ ID NO: 2136 - protein, 9 aa, Homo sapiens
SLFVGVDTI

SEQ ID NO: 2137 - protein, 9 aa, Homo sapiens
KLAEHVELS

SEQ ID NO: 2138 - protein, 9 aa, Homo sapiens
RTYRVAVGK

SEQ ID NO: 2139 - protein, 10 aa, Homo sapiens
LLRNDIALIK

SEQ ID NO: 2140 - protein, 10 aa, Homo sapiens
TRTYRVAVGK

SEQ ID NO: 2141 - protein, 11 aa, Homo sapiens
RLWTNGPIADK

SEQ ID NO: 2142 - protein, 9 aa, Homo sapiens
VVYTRVSAY

SEQ ID NO: 2143 - protein, 9 aa, Homo sapiens
RTYRVAVGK

SEQ ID NO: 2144 - protein, 9 aa, Homo sapiens
GVDTIHVHK

SEQ ID NO: 2145 - protein, 9 aa, Homo sapiens
TTWRWKTKK

SEQ ID NO: 2146 - protein, 10 aa, Homo sapiens
SAYIDWINEK

SEQ ID NO: 2147 - protein, 9 aa, Homo sapiens
AYIDWINEK

SEQ ID NO: 2148 - protein, 11 aa, Homo sapiens
SRIDWWGFRVK

SEQ ID NO: 2149 - protein, 9 aa, Homo sapiens
VYTRVSAYI

SEQ ID NO: 2150 - protein, 10 aa, Homo sapiens
CYVTGWGRLW

SEQ ID NO: 2151 - protein, 10 aa, Homo sapiens
KDYPCYVTGW

SEQ ID NO: 2152 - protein, 9 aa, Homo sapiens
AYIDWINEK

SEQ ID NO: 2153 - protein, 9 aa, Homo sapiens
VWPWERTTW

SEQ ID NO: 2154 - protein, 9 aa, Homo sapiens
RVKKTMVCA

SEQ ID NO: 2155 - protein, 9 aa, Homo sapiens
RTYRVAVGK

SEQ ID NO: 2156 - protein, 9 aa, Homo sapiens
RTTWRWKTK

SEQ ID NO: 2157 - protein, 9 aa, Homo sapiens
AYIDWINEK

SEQ ID NO: 2158 - protein, 9 aa, Homo sapiens
CISNTRTYR

SEQ ID NO: 2159 - protein, 10 aa, Homo sapiens
CSRIDWWGFR

SEQ ID NO: 2160 - protein, 10 aa, Homo sapiens
HCISNTRTYR

SEQ ID NO: 2161 - protein, 11 aa, Homo sapiens
EVFGIVSFGSR

SEQ ID NO: 2162 - protein, 10 aa, Homo sapiens
WVWTPSTSTR

SEQ ID NO: 2163 - protein, 11 aa, Homo sapiens
DYPCYVTGWGR

SEQ ID NO: 2164 - protein, 9 aa, Homo sapiens
MPSCCAMIL

SEQ ID NO: 2165 - protein, 9 aa, Homo sapiens
LPSSSLQSM

SEQ ID NO: 2166 - protein, 11 aa, Homo sapiens
RPHSWPWQISL

SEQ ID NO: 2167 - protein, 9 aa, Homo sapiens
RPHSWPWQI

SEQ ID NO: 2168 - protein, 9 aa, Homo sapiens
HVHKRWNAL

SEQ ID NO: 2169 - protein, 10 aa, Homo sapiens
IHVHKRWNAL

SEQ ID NO: 2170 - protein, 10 aa, Homo sapiens
HVHKRWNALL

SEQ ID NO: 2171 - protein, 8 aa, Homo sapiens
WINEKMQL

SEQ ID NO: 2172 - protein, 8 aa, Homo sapiens
CLPEKDSL

SEQ ID NO: 2173 - protein, 10 aa, Homo sapiens
AEHVELSDTI

SEQ ID NO: 2174 - protein, 10 aa, Homo sapiens
CQLENGSWEV

SEQ ID NO: 2175 - protein, 9 aa, Homo sapiens
VELSDTIQV

SEQ ID NO: 2176 - protein, 9 aa, Homo sapiens
RIDWWGFRV

SEQ ID NO: 2177 - protein, 9 aa, Homo sapiens
SLFVGVDTI

SEQ ID NO: 2178 - protein, 9 aa, Homo sapiens
RPHSWPWQI

SEQ ID NO: 2179 - protein, 9 aa, Homo sapiens
VVYTRVSAY

SEQ ID NO: 2180 - protein, 9 aa, Homo sapiens
ASSCGVPSF

SEQ ID NO: 2181 - protein, 9 aa, Homo sapiens
HSWPWQISL

SEQ ID NO: 2182 - protein, 9 aa, Homo sapiens
CSRIDWWGF

SEQ ID NO: 2183 - protein, 9 aa, Homo sapiens
HCISNTRTY

SEQ ID NO: 2184 - protein, 9 aa, Homo sapiens
HSWPWQISL

SEQ ID NO: 2185 - protein, 9 aa, Homo sapiens
AMILPSSSL

SEQ ID NO: 2186 - protein, 9 aa, Homo sapiens
YIDWINEKM

SEQ ID NO: 2187 - protein, 10 aa, Homo sapiens
ILPSSSLQSM

SEQ ID NO: 2188 - protein, 9 aa, Homo sapiens
CLPEKDSLL

SEQ ID NO: 2189 - protein, 8 aa, Homo sapiens
CLPEKDSL

SEQ ID NO: 2190 - protein, 9 aa, Homo sapiens
HSWPWQISL

SEQ ID NO: 2191 - protein, 9 aa, Homo sapiens
LGITVLAAL

SEQ ID NO: 2192 - protein, 9 aa, Homo sapiens
AMILPSSSL

SEQ ID NO: 2193 - protein, 9 aa, Homo sapiens
CATPGPTVW

SEQ ID NO: 2194 - protein, 8 aa, Homo sapiens
MILPSSSL

SEQ ID NO: 2195 - protein, 9 aa, Homo sapiens
YIDWINEKM

SEQ ID NO: 2196 - protein, 9 aa, Homo sapiens
MPSCCAMIL

SEQ ID NO: 2197 - protein, 9 aa, Homo sapiens
RHTCGGTLI

SEQ ID NO: 2198 - protein, 10 aa, Homo sapiens
SWEVFGIVSF

SEQ ID NO: 2199 - protein, 9 aa, Homo sapiens
VEDEEGSLF

SEQ ID NO: 2200 - protein, 8 aa, Homo sapiens
VEDEEGSL

SEQ ID NO: 2201 - protein, 9 aa, Homo sapiens
WRHTCGGTL

SEQ ID NO: 2202 - protein, 9 aa, Homo sapiens
HKRWNALLL

SEQ ID NO: 2203 - protein, 10 aa, Homo sapiens
WRHTCGGTLI

SEQ ID NO: 2204 - protein, 9 aa, Homo sapiens
HSWPWQISL

SEQ ID NO: 2205 - protein, 8 aa, Homo sapiens
TRKKPVVY

SEQ ID NO: 2206 - protein, 9 aa, Homo sapiens
TRKKPVVYT

SEQ ID NO: 2207 - protein, 9 aa, Homo sapiens
WRHTCGGTL

SEQ ID NO: 2208 - protein, 9 aa, Homo sapiens
HKRWNALLL

SEQ ID NO: 2209 - protein, 9 aa, Homo sapiens
VHKRWNALL

SEQ ID NO: 2210 - protein, 8 aa, Homo sapiens
TRKKPVVY

SEQ ID NO: 2211 - protein, 10 aa, Homo sapiens
ARPHSWPWQI

SEQ ID NO: 2212 - protein, 10 aa, Homo sapiens
KADIYTQNFY

SEQ ID NO: 2213 - protein, 10 aa, Homo sapiens
TSMTLQWHLY

SEQ ID NO: 2214 - protein, 11 aa, Homo sapiens
TTSMTLQWHLY

SEQ ID NO: 2215 - protein, 9 aa, Homo sapiens
HHDYRGILY

SEQ ID NO: 2216 - protein, 9 aa, Homo sapiens
YMIPAKTLV

SEQ ID NO: 2217 - protein, 9 aa, Homo sapiens
FAFESITNV

SEQ ID NO: 2218 - protein, 9 aa, Homo sapiens
TMLQLVPLL

SEQ ID NO: 2219 - protein, 11 aa, Homo sapiens
FLINMLENFRV

SEQ ID NO: 2220 - protein, 11 aa, Homo sapiens
YMIPAKTLVQV

SEQ ID NO: 2221 - protein, 11 aa, Homo sapiens
MLAKGLPPRSV

SEQ ID NO: 2222 - protein, 9 aa, Homo sapiens
VLRDYMIPA

SEQ ID NO: 2223 - protein, 10 aa, Homo sapiens
YQMFHTSVPM

SEQ ID NO: 2224 - protein, 10 aa, Homo sapiens
KLGNVESVYV

SEQ ID NO: 2225 - protein, 9 aa, Homo sapiens
RLHPISVTL

SEQ ID NO: 2226 - protein, 9 aa, Homo sapiens
GLPPRSVLV

SEQ ID NO: 2227 - protein, 9 aa, Homo sapiens
NLPPDLFRL

SEQ ID NO: 2228 - protein, 9 aa, Homo sapiens
FLIPPWVAY

SEQ ID NO: 2229 - protein, 9 aa, Homo sapiens
RLFRTKTWK

SEQ ID NO: 2230 - protein, 9 aa, Homo sapiens
MLQLVPLLK

SEQ ID NO: 2231 - protein, 10 aa, Homo sapiens
ILYRLLGDSK

SEQ ID NO: 2232 - protein, 9 aa, Homo sapiens
FLIPPWVAY

SEQ ID NO: 2233 - protein, 10 aa, Homo sapiens
GLPPRSVLVK

SEQ ID NO: 2234 - protein, 9 aa, Homo sapiens
AAWDVIFSK

SEQ ID NO: 2235 - protein, 11 aa, Homo sapiens
ATMLQLVPLLK

SEQ ID NO: 2236 - protein, 9 aa, Homo sapiens
SVLHRRIKK

SEQ ID NO: 2237 - protein, 9 aa, Homo sapiens
MLQLVPLLK

SEQ ID NO: 2238 - protein, 11 aa, Homo sapiens
HVAAWDVIFSK

SEQ ID NO: 2239 - protein, 10 aa, Homo sapiens
RFIDAIYQMF

SEQ ID NO: 2240 - protein, 10 aa, Homo sapiens
IYTQNFYWEL

SEQ ID NO: 2241 - protein, 9 aa, Homo sapiens
GWLNLYHFW

SEQ ID NO: 2242 - protein, 10 aa, Homo sapiens
IYALGREPTF

SEQ ID NO: 2243 - protein, 9 aa, Homo sapiens
TFFFDPENF

SEQ ID NO: 2244 - protein, 9 aa, Homo sapiens
ATKNFLPLL

SEQ ID NO: 2245 - protein, 9 aa, Homo sapiens
STRSPRPFN

SEQ ID NO: 2246 - protein, 9 aa, Homo sapiens
RLFRTKTWK

SEQ ID NO: 2247 - protein, 9 aa, Homo sapiens
KYGPIYREK

SEQ ID NO: 2248 - protein, 9 aa, Homo sapiens
NFYWELRQK

SEQ ID NO: 2249 - protein, 9 aa, Homo sapiens
AAWDVIFSK

SEQ ID NO: 2250 - protein, 9 aa, Homo sapiens
DFVSVLHRR

SEQ ID NO: 2251 - protein, 10 aa, Homo sapiens
YTQNFYWELR

SEQ ID NO: 2252 - protein, 9 aa, Homo sapiens
VAYHQYYQR

SEQ ID NO: 2253 - protein, 9 aa, Homo sapiens
EVVNPEAQR

SEQ ID NO: 2254 - protein, 11 aa, Homo sapiens
ESITNVIFGER

SEQ ID NO: 2255 - protein, 9 aa, Homo sapiens
APREGLGRL

SEQ ID NO: 2256 - protein, 10 aa, Homo sapiens
SAPREGLGRL

SEQ ID NO: 2257 - protein, 10 aa, Homo sapiens
VPMLNLPPDL

SEQ ID NO: 2258 - protein, 10 aa, Homo sapiens
SPGDNGWLNL

SEQ ID NO: 2259 - protein, 10 aa, Homo sapiens
IPSPGDNGWL

SEQ ID NO: 2260 - protein, 9 aa, Homo sapiens
TLRLHPISV

SEQ ID NO: 2261 - protein, 10 aa, Homo sapiens
MATMLQLVPL

SEQ ID NO: 2262 - protein, 9 aa, Homo sapiens
TLQWHLYEM

SEQ ID NO: 2263 - protein, 8 aa, Homo sapiens
TIFLINML

SEQ ID NO: 2264 - protein, 8 aa, Homo sapiens
YMIPAKTL

SEQ ID NO: 2265 - protein, 9 aa, Homo sapiens
AWKKDRVAL

SEQ ID NO: 2266 - protein, 10 aa, Homo sapiens
AELEMTIFLI

SEQ ID NO: 2267 - protein, 8 aa, Homo sapiens
LEMTIFLI

SEQ ID NO: 2268 - protein, 9 aa, Homo sapiens
RNLGFGWGV

SEQ ID NO: 2269 - protein, 9 aa, Homo sapiens
RLHPISVTL

SEQ ID NO: 2270 - protein, 9 aa, Homo sapiens
RQGMLEEVV

SEQ ID NO: 2271 - protein, 9 aa, Homo sapiens
AQGDMATML

SEQ ID NO: 2272 - protein, 9 aa, Homo sapiens
FAFESITNV

SEQ ID NO: 2273 - protein, 10 aa, Homo sapiens
YQMFHTSVPM

SEQ ID NO: 2274 - protein, 9 aa, Homo sapiens
FLIPPWVAY

SEQ ID NO: 2275 - protein, 9 aa, Homo sapiens
LSKDKNITY

SEQ ID NO: 2276 - protein, 9 aa, Homo sapiens
RLHPISVTL

SEQ ID NO: 2277 - protein, 9 aa, Homo sapiens
RLHPISVTL

SEQ ID NO: 2278 - protein, 9 aa, Homo sapiens
LMPEKPISF

SEQ ID NO: 2279 - protein, 9 aa, Homo sapiens
YTQNFYWEL

SEQ ID NO: 2280 - protein, 10 aa, Homo sapiens
MAPEATKNFL

SEQ ID NO: 2281 - protein, 9 aa, Homo sapiens
MAPEATKNF

SEQ ID NO: 2282 - protein, 9 aa, Homo sapiens
RSPRPFNEI

SEQ ID NO: 2283 - protein, 9 aa, Homo sapiens
FAFESITNV

SEQ ID NO: 2284 - protein, 9 aa, Homo sapiens
YALGREPTF

SEQ ID NO: 2285 - protein, 10 aa, Homo sapiens
FAFESITNVI

SEQ ID NO: 2286 - protein, 9 aa, Homo sapiens
YTQNFYWEL

SEQ ID NO: 2287 - protein, 10 aa, Homo sapiens
YVIDPEDVAL

SEQ ID NO: 2288 - protein, 9 aa, Homo sapiens
YYQRPIGVL

SEQ ID NO: 2289 - protein, 9 aa, Homo sapiens
FIDAIYQMF

SEQ ID NO: 2290 - protein, 9 aa, Homo sapiens
HHDYRGILY

SEQ ID NO: 2291 - protein, 8 aa, Homo sapiens
NFDPTRWL

SEQ ID NO: 2292 - protein, 8 aa, Homo sapiens
FFDPENFD

SEQ ID NO: 2293 - protein, 9 aa, Homo sapiens
HWCKWPSML

SEQ ID NO: 2294 - protein, 9 aa, Homo sapiens
YRGILYRLL

SEQ ID NO: 2295 - protein, 9 aa, Homo sapiens
YRLLGDSKM

SEQ ID NO: 2296 - protein, 9 aa, Homo sapiens
YYQRPIGVL

SEQ ID NO: 2297 - protein, 8 aa, Homo sapiens
SRDFVSVL

SEQ ID NO: 2298 - protein, 9 aa, Homo sapiens
VSRDFVSVL

SEQ ID NO: 2299 - protein, 9 aa, Homo sapiens
YYQRPIGVL

SEQ ID NO: 2300 - protein, 9 aa, Homo sapiens
YRGILYRLL

SEQ ID NO: 2301 - protein, 9 aa, Homo sapiens
RFIDAIYQM

SEQ ID NO: 2302 - protein, 8 aa, Homo sapiens
FRVEIQHL

SEQ ID NO: 2303 - protein, 9 aa, Homo sapiens
SSDLVLQNY

SEQ ID NO: 2304 - protein, 10 aa, Homo sapiens
SMDAPTSRLY

SEQ ID NO: 2305 - protein, 10 aa, Homo sapiens
LTQEDIKMVY

SEQ ID NO: 2306 - protein, 10 aa, Homo sapiens
ASSDLVLQNY

SEQ ID NO: 2307 - protein, 11 aa, Homo sapiens
TLDVQPSIFHY

SEQ ID NO: 2308 - protein, 12 aa, Homo sapiens
WLDIRGSGRNFY

SEQ ID NO: 2309 - protein, 10 aa, Homo sapiens
FILRPSMFPL

SEQ ID NO: 2310 - protein, 10 aa, Homo sapiens
FPLLMTLFEL

SEQ ID NO: 2311 - protein, 9 aa, Homo sapiens
RLAEAEMLL

SEQ ID NO: 2312 - protein, 9 aa, Homo sapiens
RLYPVGLFL

SEQ ID NO: 2313 - protein, 10 aa, Homo sapiens
SMFPLLTFRA

SEQ ID NO: 2314 - protein, 9 aa, Homo sapiens
LLMTLFELA

SEQ ID NO: 2315 - protein, 8 aa, Homo sapiens
LLMTLFEL

SEQ ID NO: 2316 - protein, 9 aa, Homo sapiens
MLPEDVEKL

SEQ ID NO: 2317 - protein, 9 aa, Homo sapiens
SIFHYTIEA

SEQ ID NO: 2318 - protein, 9 aa, Homo sapiens
ILRPSMFPL

SEQ ID NO: 2319 - protein, 9 aa, Homo sapiens
ALFGERLGL

SEQ ID NO: 2320 - protein, 10 aa, Homo sapiens
RLAEAEMLLL

SEQ ID NO: 2321 - protein, 10 aa, Homo sapiens
ALFGERLGLV

SEQ ID NO: 2322 - protein, 9 aa, Homo sapiens
SLHPHRMSL

SEQ ID NO: 2323 - protein, 11 aa, Homo sapiens
TLFELARNPNV

SEQ ID NO: 2324 - protein, 11 aa, Homo sapiens
RLAEAEMLLLL

SEQ ID NO: 2325 - protein, 9 aa, Homo sapiens
TVFPLLMTL

SEQ ID NO: 2326 - protein, 10 aa, Homo sapiens
RSLSRWTSPK

SEQ ID NO: 2327 - protein, 9 aa, Homo sapiens
SLSRWTSPK

SEQ ID NO: 2328 - protein, 10 aa, Homo sapiens
FLHALEVMFK

SEQ ID NO: 2329 - protein, 9 aa, Homo sapiens
SMFPLLTFR

SEQ ID NO: 2330 - protein, 10 aa, Homo sapiens
LMFMPRSLSR

SEQ ID NO: 2331 - protein, 9 aa, Homo sapiens
RLYPVGLFL

SEQ ID NO: 2332 - protein, 11 aa, Homo sapiens
RLYPVGLFLER

SEQ ID NO: 2333 - protein, 9 aa, Homo sapiens
ALFPRPERY

SEQ ID NO: 2334 - protein, 9 aa, Homo sapiens
RVFLYSLGR

SEQ ID NO: 2335 - protein, 9 aa, Homo sapiens
SLSRWTSPK

SEQ ID NO: 2336 - protein, 9 aa, Homo sapiens
SMFPLLTFR

SEQ ID NO: 2337 - protein, 10 aa, Homo sapiens
RSLSRWTSPK

SEQ ID NO: 2338 - protein, 9 aa, Homo sapiens
RVFLYSLGR

SEQ ID NO: 2339 - protein, 9 aa, Homo sapiens
ATTELPLLR

SEQ ID NO: 2340 - protein, 9 aa, Homo sapiens
STGSPIQLR

SEQ ID NO: 2341 - protein, 11 aa, Homo sapiens
QTFQELGPIFR

SEQ ID NO: 2342 - protein, 9 aa, Homo sapiens
ASISEHPQK

SEQ ID NO: 2343 - protein, 9 aa, Homo sapiens
RWLRLLQIW

SEQ ID NO: 2344 - protein, 10 aa, Homo sapiens
RYNPQRWLDI

SEQ ID NO: 2345 - protein, 9 aa, Homo sapiens
VFPLLMTLF

SEQ ID NO: 2346 - protein, 10 aa, Homo sapiens
RNFYHVPFGF

SEQ ID NO: 2347 - protein, 10 aa, Homo sapiens
MFKSTVQLMF

SEQ ID NO: 2348 - protein, 9 aa, Homo sapiens
QYTSIVAEL

SEQ ID NO: 2349 - protein, 9 aa, Homo sapiens
TFQELGPIF

SEQ ID NO: 2350 - protein, 9 aa, Homo sapiens
NFYHVPFGF

SEQ ID NO: 2351 - protein, 9 aa, Homo sapiens
RSRHSASFG

SEQ ID NO: 2352 - protein, 10 aa, Homo sapiens
RSLSRWTSPK

SEQ ID NO: 2353 - protein, 9 aa, Homo sapiens
RAKAEVCMA

SEQ ID NO: 2354 - protein, 9 aa, Homo sapiens
AYRQHRGHK

SEQ ID NO: 2355 - protein, 9 aa, Homo sapiens
ASISEHPQK

SEQ ID NO: 2356 - protein, 9 aa, Homo sapiens
QYGDNCIQK

SEQ ID NO: 2357 - protein, 9 aa, Homo sapiens
ALKETLRLY

SEQ ID NO: 2358 - protein, 9 aa, Homo sapiens
RWTSPKVWK

SEQ ID NO: 2359 - protein, 9 aa, Homo sapiens
SMFPLLTFR

SEQ ID NO: 2360 - protein, 10 aa, Homo sapiens
MSLEPWVAYR

SEQ ID NO: 2361 - protein, 10 aa, Homo sapiens
HSASFGRWGR

SEQ ID NO: 2362 - protein, 9 aa, Homo sapiens
SASFGRWGR

SEQ ID NO: 2363 - protein, 9 aa, Homo sapiens
MFMPRSLSR

SEQ ID NO: 2364 - protein, 10 aa, Homo sapiens
EVLSPNAVQR

SEQ ID NO: 2365 - protein, 9 aa, Homo sapiens
ELGPIFRSR

SEQ ID NO: 2366 - protein, 9 aa, Homo sapiens
STGSPIQLR

SEQ ID NO: 2367 - protein, 10 aa, Homo sapiens
MPRRPGNRWL

SEQ ID NO: 2368 - protein, 9 aa, Homo sapiens
HPQKATTEL

SEQ ID NO: 2369 - protein, 10 aa, Homo sapiens
SPIQLRTLSM

SEQ ID NO: 2370 - protein, 9 aa, Homo sapiens
RPQQYTSIV

SEQ ID NO: 2371 - protein, 9 aa, Homo sapiens
SPSSASLNF

SEQ ID NO: 2372 - protein, 10 aa, Homo sapiens
RPSMFPLLTF

SEQ ID NO: 2373 - protein, 9 aa, Homo sapiens
SLHPHRMSL

SEQ ID NO: 2374 - protein, 9 aa, Homo sapiens
NAVQRFLPM

SEQ ID NO: 2375 - protein, 9 aa, Homo sapiens
MLLLLHHVL

SEQ ID NO: 2376 - protein, 10 aa, Homo sapiens
WLSLQRAQAL

SEQ ID NO: 2377 - protein, 8 aa, Homo sapiens
DIKMVYSF

SEQ ID NO: 2378 - protein, 9 aa, Homo sapiens
SQALKKKVL

SEQ ID NO: 2379 - protein, 8 aa, Homo sapiens
QALKKKVL

SEQ ID NO: 2380 - protein, 8 aa, Homo sapiens
SLNFLHAL

SEQ ID NO: 2381 - protein, 9 aa, Homo sapiens
AEAEMLLLL

SEQ ID NO: 2382 - protein, 9 aa, Homo sapiens
LNFLHALEV

SEQ ID NO: 2383 - protein, 10 aa, Homo sapiens
KEHFEAWDCI

SEQ ID NO: 2384 - protein, 10 aa, Homo sapiens
AEMLLLLHHV

SEQ ID NO: 2385 - protein, 9 aa, Homo sapiens
RLYPVGLFL

SEQ ID NO: 2386 - protein, 9 aa, Homo sapiens
YGDNCIQKI

SEQ ID NO: 2387 - protein, 9 aa, Homo sapiens
GQDSEALKY

SEQ ID NO: 2388 - protein, 8 aa, Homo sapiens
RQHRGHKC

SEQ ID NO: 2389 - protein, 9 aa, Homo sapiens
LAFSRPQQY

SEQ ID NO: 2390 - protein, 9 aa, Homo sapiens
YSFILRPSM

SEQ ID NO: 2391 - protein, 10 aa, Homo sapiens
YTIEASNLAL

SEQ ID NO: 2392 - protein, 9 aa, Homo sapiens
MSLEPWVAY

SEQ ID NO: 2393 - protein, 9 aa, Homo sapiens
VARDFSQAL

SEQ ID NO: 2394 - protein, 9 aa, Homo sapiens
SLHPHRMSL

SEQ ID NO: 2395 - protein, 9 aa, Homo sapiens
AARVPRTVL

SEQ ID NO: 2396 - protein, 9 aa, Homo sapiens
SLHPHRMSL

SEQ ID NO: 2397 - protein, 9 aa, Homo sapiens
SMDAPTSRL

SEQ ID NO: 2398 - protein, 9 aa, Homo sapiens
YSLGRNPAL

SEQ ID NO: 2399 - protein, 9 aa, Homo sapiens
RVPRTVLPF

SEQ ID NO: 2400 - protein, 10 aa, Homo sapiens
NGPEWRFNRL

SEQ ID NO: 2401 - protein, 8 aa, Homo sapiens
HSPSSASL

SEQ ID NO: 2402 - protein, 9 aa, Homo sapiens
MLPEDVEKL

SEQ ID NO: 2403 - protein, 9 aa, Homo sapiens
ELPLLRAAL

SEQ ID NO: 2404 - protein, 9 aa, Homo sapiens
YSLGRNPAL

SEQ ID NO: 2405 - protein, 9 aa, Homo sapiens
YSFILRPSM

SEQ ID NO: 2406 - protein, 9 aa, Homo sapiens
NAVQRFLPM

SEQ ID NO: 2407 - protein, 10 aa, Homo sapiens
YTIEASNLAL

SEQ ID NO: 2408 - protein, 9 aa, Homo sapiens
VARDFSQAL

SEQ ID NO: 2409 - protein, 8 aa, Homo sapiens
MAVPWLSL

SEQ ID NO: 2410 - protein, 9 aa, Homo sapiens
SLHPHRMSL

SEQ ID NO: 2411 - protein, 9 aa, Homo sapiens
RYDLGGAGM

SEQ ID NO: 2412 - protein, 9 aa, Homo sapiens
KYDLGGAGM

SEQ ID NO: 2413 - protein, 10 aa, Homo sapiens
FRYDLGGAGM

SEQ ID NO: 2414 - protein, 9 aa, Homo sapiens
SMDAPTSRL

SEQ ID NO: 2415 - protein, 9 aa, Homo sapiens
TLDVQPSIF

SEQ ID NO: 2416 - protein, 9 aa, Homo sapiens
VFPLLMTLF

SEQ ID NO: 2417 - protein, 9 aa, Homo sapiens
FRSRHSASF

SEQ ID NO: 2418 - protein, 9 aa, Homo sapiens
MRQCLGRRL

SEQ ID NO: 2419 - protein, 9 aa, Homo sapiens
ERYNPQRWL

SEQ ID NO: 2420 - protein, 10 aa, Homo sapiens
SRLYPVGLFL

SEQ ID NO: 2421 - protein, 8 aa, Homo sapiens
RYNPQRWL

SEQ ID NO: 2422 - protein, 8 aa, Homo sapiens
RRPGNRWL

SEQ ID NO: 2423 - protein, 9 aa, Homo sapiens
CRNGPEWRF

SEQ ID NO: 2424 - protein, 9 aa, Homo sapiens
FRSRHSASF

SEQ ID NO: 2425 - protein, 9 aa, Homo sapiens
LRPSMFPLL

SEQ ID NO: 2426 - protein, 9 aa, Homo sapiens
MFKSTVQLM

SEQ ID NO: 2427 - protein, 9 aa, Homo sapiens
MRQCLGRRL

SEQ ID NO: 2428 - protein, 9 aa, Homo sapiens
FKSTVQLMF

SEQ ID NO: 2429 - protein, 8 aa, Homo sapiens
ARVPRTVL

SEQ ID NO: 2430 - protein, 9 aa, Homo sapiens
NYHIPAGVL

SEQ ID NO: 2431 - protein, 10 aa, Homo sapiens
VSSDLVLQNY

SEQ ID NO: 2432 - protein, 9 aa, Homo sapiens
GTLVQVFLY

SEQ ID NO: 2433 - protein, 11 aa, Homo sapiens
VVSSDLVLQNY

SEQ ID NO: 2434 - protein, 10 aa, Homo sapiens
AGTLVQVFLY

SEQ ID NO: 2435 - protein, 8 aa, Homo sapiens
ILEPWVAY

SEQ ID NO: 2436 - protein, 9 aa, Homo sapiens
YTGIVAELL

SEQ ID NO: 2437 - protein, 10 aa, Homo sapiens
SLSRWISPKV

SEQ ID NO: 2438 - protein, 10 aa, Homo sapiens
FILRPGTSPL

SEQ ID NO: 2439 - protein, 9 aa, Homo sapiens
RMILEPWVA

SEQ ID NO: 2440 - protein, 9 aa, Homo sapiens
LLLKAELSL

SEQ ID NO: 2441 - protein, 11 aa, Homo sapiens
FLVETLTQEDI

SEQ ID NO: 2442 - protein, 10 aa, Homo sapiens
LLHHVLKHFL

SEQ ID NO: 2443 - protein, 9 aa, Homo sapiens
FLYSLGRNA

SEQ ID NO: 2444 - protein, 10 aa, Homo sapiens
TLVQVFLYSL

SEQ ID NO: 2445 - protein, 11 aa, Homo sapiens
AFPLLMTLFEL

SEQ ID NO: 2446 - protein, 9 aa, Homo sapiens
FLVETLTQE

SEQ ID NO: 2447 - protein, 9 aa, Homo sapiens
IPAGTLVQV

SEQ ID NO: 2448 - protein, 11 aa, Homo sapiens
TLFELARNPDV

SEQ ID NO: 2449 - protein, 9 aa, Homo sapiens
IVAELLLKA

SEQ ID NO: 2450 - protein, 10 aa, Homo sapiens
ILRPGTSPLL

SEQ ID NO: 2451 - protein, 10 aa, Homo sapiens
FLYSLGRNAA

SEQ ID NO: 2452 - protein, 10 aa, Homo sapiens
RSLSRWISPK

SEQ ID NO: 2453 - protein, 9 aa, Homo sapiens
SLSRWISPK

SEQ ID NO: 2454 - protein, 10 aa, Homo sapiens
RLNPDVLSPK

SEQ ID NO: 2455 - protein, 9 aa, Homo sapiens
MILEPWVAY

SEQ ID NO: 2456 - protein, 9 aa, Homo sapiens
SLSRWISPK

SEQ ID NO: 2457 - protein, 10 aa, Homo sapiens
RSLSRWISPK

SEQ ID NO: 2458 - protein, 9 aa, Homo sapiens
GTSPLLTFR

SEQ ID NO: 2459 - protein, 9 aa, Homo sapiens
GIVAELLLK

SEQ ID NO: 2460 - protein, 9 aa, Homo sapiens
RWISPKVWK

SEQ ID NO: 2461 - protein, 10 aa, Homo sapiens
RNFHHVPFGF

SEQ ID NO: 2462 - protein, 11 aa, Homo sapiens
LYSLGRNAALF

SEQ ID NO: 2463 - protein, 9 aa, Homo sapiens
AFPLLMTLF

SEQ ID NO: 2464 - protein, 9 aa, Homo sapiens
HYTGIVAEL

SEQ ID NO: 2465 - protein, 9 aa, Homo sapiens
NFHHVPFGF

SEQ ID NO: 2466 - protein, 9 aa, Homo sapiens
RARALGTRA

SEQ ID NO: 2467 - protein, 10 aa, Homo sapiens
RSLSRWISPK

SEQ ID NO: 2468 - protein, 10 aa, Homo sapiens
RARALGTRAA

SEQ ID NO: 2469 - protein, 9 aa, Homo sapiens
RWISPKVWK

SEQ ID NO: 2470 - protein, 9 aa, Homo sapiens
LSRWISPKV

SEQ ID NO: 2471 - protein, 10 aa, Homo sapiens
MILEPWVAYR

SEQ ID NO: 2472 - protein, 9 aa, Homo sapiens
GTRAARAPR

SEQ ID NO: 2473 - protein, 12 aa, Homo sapiens
YSLGRNAALFPR

SEQ ID NO: 2474 - protein, 10 aa, Homo sapiens
DVLSPKAVQR

SEQ ID NO: 2475 - protein, 9 aa, Homo sapiens
IYQELAFNR

SEQ ID NO: 2476 - protein, 9 aa, Homo sapiens
SPLLTFRAI

SEQ ID NO: 2477 - protein, 9 aa, Homo sapiens
RPQHYTGIV

SEQ ID NO: 2478 - protein, 9 aa, Homo sapiens
AARAPRTVL

SEQ ID NO: 2479 - protein, 9 aa, Homo sapiens
GPRMVCVML

SEQ ID NO: 2480 - protein, 9 aa, Homo sapiens
SPKAVQRFL

SEQ ID NO: 2481 - protein, 10 aa, Homo sapiens
WLSLQRARAL

SEQ ID NO: 2482 - protein, 9 aa, Homo sapiens
KAVQRFLPM

SEQ ID NO: 2483 - protein, 11 aa, Homo sapiens
SPKAVQRFLPM

SEQ ID NO: 2484 - protein, 8 aa, Homo sapiens
ELLLKAEL

SEQ ID NO: 2485 - protein, 8 aa, Homo sapiens
HHVLKHFL

SEQ ID NO: 2486 - protein, 9 aa, Homo sapiens
HPGNRWLRL

SEQ ID NO: 2487 - protein, 10 aa, Homo sapiens
LERVVSSDLV

SEQ ID NO: 2488 - protein, 10 aa, Homo sapiens
LEMHQTFQEL

SEQ ID NO: 2489 - protein, 9 aa, Homo sapiens
VDTTAFPLL

SEQ ID NO: 2490 - protein, 9 aa, Homo sapiens
EQGYEHLHL

SEQ ID NO: 2491 - protein, 9 aa, Homo sapiens
ARNPDVQQI

SEQ ID NO: 2492 - protein, 8 aa, Homo sapiens
RNPDVQQI

SEQ ID NO: 2493 - protein, 9 aa, Homo sapiens
KAVQRFLPM

SEQ ID NO: 2494 - protein, 9 aa, Homo sapiens
LAFNRPQHY

SEQ ID NO: 2495 - protein, 9 aa, Homo sapiens
RAPRTVLPF

SEQ ID NO: 2496 - protein, 9 aa, Homo sapiens
MILEPWVAY

SEQ ID NO: 2497 - protein, 8 aa, Homo sapiens
ILEPWVAY

SEQ ID NO: 2498 - protein, 9 aa, Homo sapiens
ILRPGTSPL

SEQ ID NO: 2499 - protein, 9 aa, Homo sapiens
YSLGRNAAL

SEQ ID NO: 2500 - protein, 9 aa, Homo sapiens
ILRPGTSPL

SEQ ID NO: 2501 - protein, 9 aa, Homo sapiens
RAPRTVLPF

SEQ ID NO: 2502 - protein, 8 aa, Homo sapiens
LRPGTSPL

SEQ ID NO: 2503 - protein, 8 aa, Homo sapiens
AFPLLMTL

SEQ ID NO: 2504 - protein, 9 aa, Homo sapiens
YSLGRNAAL

SEQ ID NO: 2505 - protein, 9 aa, Homo sapiens
TAFPLLMTL

SEQ ID NO: 2506 - protein, 9 aa, Homo sapiens
KAVQRFLPM

SEQ ID NO: 2507 - protein, 8 aa, Homo sapiens
VAAPWLSL

SEQ ID NO: 2508 - protein, 9 aa, Homo sapiens
RYNLGGPRM

SEQ ID NO: 2509 - protein, 9 aa, Homo sapiens
GYEHLHLEM

SEQ ID NO: 2510 - protein, 9 aa, Homo sapiens
HYTGIVAEL

SEQ ID NO: 2511 - protein, 9 aa, Homo sapiens
AFPLLMTLF

SEQ ID NO: 2512 - protein, 8 aa, Homo sapiens
AFPLLMTL

SEQ ID NO: 2513 - protein, 10 aa, Homo sapiens
FRYNLGGPRM

SEQ ID NO: 2514 - protein, 9 aa, Homo sapiens
LRPGTSPLL

SEQ ID NO: 2515 - protein, 11 aa, Homo sapiens
FRYNLGGPRMV

SEQ ID NO: 2516 - protein, 9 aa, Homo sapiens
RNPDVQQIL

SEQ ID NO: 2517 - protein, 9 aa, Homo sapiens
ARNPDVQQI

SEQ ID NO: 2518 - protein, 8 aa, Homo sapiens
ARAPRTVL

SEQ ID NO: 2519 - protein, 9 aa, Homo sapiens
HYTGIVAEL

SEQ ID NO: 2520 - protein, 9 aa, Homo sapiens
LRPGTSPLL

SEQ ID NO: 2521 - protein, 10 aa, Homo sapiens
FRYNLGGPRM

SEQ ID NO: 2522 - protein, 8 aa, Homo sapiens
ARAPRTVL

SEQ ID NO: 2523 - protein, 10 aa, Homo sapiens
ARNPDVQQIL

SEQ ID NO: 2524 - protein, 12 aa, Homo sapiens
MAVREDLYCFSY

SEQ ID NO: 2525 - protein, 12 aa, Homo sapiens
WSCAWSLSIHAY

SEQ ID NO: 2526 - protein, 9 aa, Homo sapiens
SSDVLAQQF

SEQ ID NO: 2527 - protein, 9 aa, Homo sapiens
LMAVREDLY

SEQ ID NO: 2528 - protein, 9 aa, Homo sapiens
QVEAGGSKY

SEQ ID NO: 2529 - protein, 9 aa, Homo sapiens
HLDSHLLLC

SEQ ID NO: 2530 - protein, 9 aa, Homo sapiens
LTTPELRVY

SEQ ID NO: 2531 - protein, 9 aa, Homo sapiens
ILQDGQFLV

SEQ ID NO: 2532 - protein, 9 aa, Homo sapiens
VLLPASLFI

SEQ ID NO: 2533 - protein, 10 aa, Homo sapiens
RVYPHKTLYV

SEQ ID NO: 2534 - protein, 10 aa, Homo sapiens
AVLLPASLFI

SEQ ID NO: 2535 - protein, 10 aa, Homo sapiens
SMCWASLNHL

SEQ ID NO: 2536 - protein, 10 aa, Homo sapiens
QILQDGQFLV

SEQ ID NO: 2537 - protein, 10 aa, Homo sapiens
SLFIGSFPGM

SEQ ID NO: 2538 - protein, 10 aa, Homo sapiens
FLRFANYCRI

SEQ ID NO: 2539 - protein, 9 aa, Homo sapiens
QQFAIMTPL

SEQ ID NO: 2540 - protein, 12 aa, Homo sapiens
GLADTPSCAVLL

SEQ ID NO: 2541 - protein, 10 aa, Homo sapiens
GLADTPSCAV

SEQ ID NO: 2542 - protein, 9 aa, Homo sapiens
GLADTPSCA

SEQ ID NO: 2543 - protein, 9 aa, Homo sapiens
GLTTPELRV

SEQ ID NO: 2544 - protein, 9 aa, Homo sapiens
TLYVPNRKV

SEQ ID NO: 2545 - protein, 9 aa, Homo sapiens
HLLLCFVGL

SEQ ID NO: 2546 - protein, 10 aa, Homo sapiens
SLNHLDSHLL

SEQ ID NO: 2547 - protein, 10 aa, Homo sapiens
GLNAPSMLRK

SEQ ID NO: 2548 - protein, 9 aa, Homo sapiens
RVYPHKTLY

SEQ ID NO: 2549 - protein, 9 aa, Homo sapiens
KLWDLRATK

SEQ ID NO: 2550 - protein, 9 aa, Homo sapiens
KTLYVPNRK

SEQ ID NO: 2551 - protein, 10 aa, Homo sapiens
GLNAPSMLRK

SEQ ID NO: 2552 - protein, 9 aa, Homo sapiens
RVYPHKTLY

SEQ ID NO: 2553 - protein, 9 aa, Homo sapiens
GTIKLWDLR

SEQ ID NO: 2554 - protein, 10 aa, Homo sapiens
SSLASDRFNR

SEQ ID NO: 2555 - protein, 10 aa, Homo sapiens
QFAIMTPLLF

SEQ ID NO: 2556 - protein, 10 aa, Homo sapiens
KYGIITMRGL

SEQ ID NO: 2557 - protein, 10 aa, Homo sapiens
AWSCAWSLSI

SEQ ID NO: 2558 - protein, 9 aa, Homo sapiens
AYLPVHVNE

SEQ ID NO: 2559 - protein, 9 aa, Homo sapiens
VYPHKTLYV

SEQ ID NO: 2560 - protein, 10 aa, Homo sapiens
RVYPHKTLYV

SEQ ID NO: 2561 - protein, 10 aa, Homo sapiens
ASDRFNRILA

SEQ ID NO: 2562 - protein, 9 aa, Homo sapiens
RVYPHKTLY

SEQ ID NO: 2563 - protein, 9 aa, Homo sapiens
KLWDLRATK

SEQ ID NO: 2564 - protein, 9 aa, Homo sapiens
GSKYGIITM

SEQ ID NO: 2565 - protein, 9 aa, Homo sapiens
RVSCMQRKK

SEQ ID NO: 2566 - protein, 9 aa, Homo sapiens
FANYCRIAR

SEQ ID NO: 2567 - protein, 9 aa, Homo sapiens
FLRFANYCR

SEQ ID NO: 2568 - protein, 9 aa, Homo sapiens
CYTRIWSLR

SEQ ID NO: 2569 - protein, 9 aa, Homo sapiens
SKYGIITMR

SEQ ID NO: 2570 - protein, 9 aa, Homo sapiens
ELRVSCMQR

SEQ ID NO: 2571 - protein, 9 aa, Homo sapiens
FPGMRRPGM

SEQ ID NO: 2572 - protein, 10 aa, Homo sapiens
APSMLRKNQL

SEQ ID NO: 2573 - protein, 9 aa, Homo sapiens
VPNRKVNSM

SEQ ID NO: 2574 - protein, 10 aa, Homo sapiens
LPASLFIGSF

SEQ ID NO: 2575 - protein, 10 aa, Homo sapiens
FPGMRRPGML

SEQ ID NO: 2576 - protein, 9 aa, Homo sapiens
FPGMRRPGM

SEQ ID NO: 2577 - protein, 9 aa, Homo sapiens
CMQRKKVQI

SEQ ID NO: 2578 - protein, 9 aa, Homo sapiens
DAWSCAWSL

SEQ ID NO: 2579 - protein, 9 aa, Homo sapiens
TGTIKLWDL

SEQ ID NO: 2580 - protein, 9 aa, Homo sapiens
PSMLRKNQL

SEQ ID NO: 2581 - protein, 9 aa, Homo sapiens
WSCAWSLSI

SEQ ID NO: 2582 - protein, 10 aa, Homo sapiens
LDSHLLLCFV

SEQ ID NO: 2583 - protein, 10 aa, Homo sapiens
QQFAIMTPLL

SEQ ID NO: 2584 - protein, 9 aa, Homo sapiens
SQQVLLTNV

SEQ ID NO: 2585 - protein, 9 aa, Homo sapiens
GLTTPELRV

SEQ ID NO: 2586 - protein, 9 aa, Homo sapiens
TLYVPNRKV

SEQ ID NO: 2587 - protein, 9 aa, Homo sapiens
FAIMTPLLF

SEQ ID NO: 2588 - protein, 9 aa, Homo sapiens
LSIHAYHSF

SEQ ID NO: 2589 - protein, 9 aa, Homo sapiens
LLTTIPSPY

SEQ ID NO: 2590 - protein, 9 aa, Homo sapiens
FQIPDAWSC

SEQ ID NO: 2591 - protein, 8 aa, Homo sapiens
SIHAYHSF

SEQ ID NO: 2592 - protein, 9 aa, Homo sapiens
WSLRHGHLL

SEQ ID NO: 2593 - protein, 9 aa, Homo sapiens
FAIMTPLLF

SEQ ID NO: 2594 - protein, 9 aa, Homo sapiens
LADTPSCAV

SEQ ID NO: 2595 - protein, 10 aa, Homo sapiens
YVPNRKVNSM

SEQ ID NO: 2596 - protein, 9 aa, Homo sapiens
YLPVHVNEE

SEQ ID NO: 2597 - protein, 10 aa, Homo sapiens
LSHDSAVTSL

SEQ ID NO: 2598 - protein, 9 aa, Homo sapiens
FAIMTPLLF

SEQ ID NO: 2599 - protein, 9 aa, Homo sapiens
SAVTSLQIL

SEQ ID NO: 2600 - protein, 9 aa, Homo sapiens
LANTNTDQL

SEQ ID NO: 2601 - protein, 8 aa, Homo sapiens
FAIMTPLL

SEQ ID NO: 2602 - protein, 11 aa, Homo sapiens
FANYCRIAREL

SEQ ID NO: 2603 - protein, 9 aa, Homo sapiens
SHDSAVTSL

SEQ ID NO: 2604 - protein, 9 aa, Homo sapiens
FRGAPGLLM

SEQ ID NO: 2605 - protein, 9 aa, Homo sapiens
FAIMTPLLF

SEQ ID NO: 2606 - protein, 9 aa, Homo sapiens
LWDLRATKC

SEQ ID NO: 2607 - protein, 8 aa, Homo sapiens
HLDSHLLL

SEQ ID NO: 2608 - protein, 9 aa, Homo sapiens
FRGAPGLLM

SEQ ID NO: 2609 - protein, 9 aa, Homo sapiens
LRFANYCRI

SEQ ID NO: 2610 - protein, 9 aa, Homo sapiens
LRKNQLGFL

SEQ ID NO: 2611 - protein, 9 aa, Homo sapiens
RRPGMLCSF

SEQ ID NO: 2612 - protein, 9 aa, Homo sapiens
MRGLTTPEL

SEQ ID NO: 2613 - protein, 9 aa, Homo sapiens
CRSGEIFGI

SEQ ID NO: 2614 - protein, 9 aa, Homo sapiens
FRGAPGLLM

SEQ ID NO: 2615 - protein, 9 aa, Homo sapiens
RRPGMLCSF

SEQ ID NO: 2616 - protein, 9 aa, Homo sapiens
LRFANYCRI

SEQ ID NO: 2617 - protein, 9 aa, Homo sapiens
NYCRIAREL

SEQ ID NO: 2618 - protein, 8 aa, Homo sapiens
FRGAPGLL

SEQ ID NO: 2619 - protein, 9 aa, Homo sapiens
YVISAPSIY

SEQ ID NO: 2620 - protein, 12 aa, Homo sapiens
FSGLVCACAPGY

SEQ ID NO: 2621 - protein, 12 aa, Homo sapiens
RSFECTCPRGFY

SEQ ID NO: 2622 - protein, 8 aa, Homo sapiens
CTCPRGFY

SEQ ID NO: 2623 - protein, 8 aa, Homo sapiens
DVDPQGIY

SEQ ID NO: 2624 - protein, 8 aa, Homo sapiens
GADPDSAY

SEQ ID NO: 2625 - protein, 9 aa, Homo sapiens
DVDPQGIYV

SEQ ID NO: 2626 - protein, 9 aa, Homo sapiens
LLFPYPSSI

SEQ ID NO: 2627 - protein, 10 aa, Homo sapiens
YMGARCEFPV

SEQ ID NO: 2628 - protein, 9 aa, Homo sapiens
YLLPPALGL

SEQ ID NO: 2629 - protein, 10 aa, Homo sapiens
YLLPPALGLL

SEQ ID NO: 2630 - protein, 12 aa, Homo sapiens
LLFPYPSSILSV

SEQ ID NO: 2631 - protein, 10 aa, Homo sapiens
RLPCRLFFRV

SEQ ID NO: 2632 - protein, 10 aa, Homo sapiens
LLFPYPSSIL

SEQ ID NO: 2633 - protein, 9 aa, Homo sapiens
ALPDALNNL

SEQ ID NO: 2634 - protein, 11 aa, Homo sapiens
YLLPPALGLLV

SEQ ID NO: 2635 - protein, 10 aa, Homo sapiens
LPLPDGLLQV

SEQ ID NO: 2636 - protein, 9 aa, Homo sapiens
PLPDGLLQV

SEQ ID NO: 2637 - protein, 9 aa, Homo sapiens
GLLSQTVIL

SEQ ID NO: 2638 - protein, 10 aa, Homo sapiens
LLAGTPEPSV

SEQ ID NO: 2639 - protein, 9 aa, Homo sapiens
ALPAAPPGL

SEQ ID NO: 2640 - protein, 10 aa, Homo sapiens
GLLSQTVILA

SEQ ID NO: 2641 - protein, 9 aa, Homo sapiens
RLFFRVCLK

SEQ ID NO: 2642 - protein, 10 aa, Homo sapiens
CRLFFRVCLK

SEQ ID NO: 2643 - protein, 10 aa, Homo sapiens
RLFFRVCLKP

SEQ ID NO: 2644 - protein, 12 aa, Homo sapiens
LPCRLFFRVCLK

SEQ ID NO: 2645 - protein, 9 aa, Homo sapiens
SLLARVAGR

SEQ ID NO: 2646 - protein, 10 aa, Homo sapiens
RLAAGGPWAR

SEQ ID NO: 2647 - protein, 9 aa, Homo sapiens
YLLPPALGL

SEQ ID NO: 2648 - protein, 9 aa, Homo sapiens
RLFFRVCLK

SEQ ID NO: 2649 - protein, 9 aa, Homo sapiens
STSSCLSPR

SEQ ID NO: 2650 - protein, 9 aa, Homo sapiens
RSFECTCPR

SEQ ID NO: 2651 - protein, 10 aa, Homo sapiens
VISAPSIYAR

SEQ ID NO: 2652 - protein, 9 aa, Homo sapiens
GTFSFIIET

SEQ ID NO: 2653 - protein, 11 aa, Homo sapiens
GTFSFIIETWR

SEQ ID NO: 2654 - protein, 11 aa, Homo sapiens
YVISAPSIYAR

SEQ ID NO: 2655 - protein, 11 aa, Homo sapiens
IYAREVATPLF

SEQ ID NO: 2656 - protein, 10 aa, Homo sapiens
RYLLPPALGL

SEQ ID NO: 2657 - protein, 9 aa, Homo sapiens
GYMGARCEF

SEQ ID NO: 2658 - protein, 9 aa, Homo sapiens
TFSFIIETW

SEQ ID NO: 2659 - protein, 9 aa, Homo sapiens
IYVISAPSI

SEQ ID NO: 2660 - protein, 10 aa, Homo sapiens
AYICHCPPGF

SEQ ID NO: 2661 - protein, 9 aa, Homo sapiens
VFELQIHSF

SEQ ID NO: 2662 - protein, 9 aa, Homo sapiens
RARCEPPAV

SEQ ID NO: 2663 - protein, 9 aa, Homo sapiens
RLFFRVCLK

SEQ ID NO: 2664 - protein, 9 aa, Homo sapiens
RVAGRRRLA

SEQ ID NO: 2665 - protein, 10 aa, Homo sapiens
CTRLCRPRSA

SEQ ID NO: 2666 - protein, 9 aa, Homo sapiens
GTFSFIIET

SEQ ID NO: 2667 - protein, 9 aa, Homo sapiens
STSSCLSPR

SEQ ID NO: 2668 - protein, 9 aa, Homo sapiens
FSFIIETWR

SEQ ID NO: 2669 - protein, 10 aa, Homo sapiens
TFSFIIETWR

SEQ ID NO: 2670 - protein, 9 aa, Homo sapiens
ELRFSYRAR

SEQ ID NO: 2671 - protein, 11 aa, Homo sapiens
YVISAPSIYAR

SEQ ID NO: 2672 - protein, 9 aa, Homo sapiens
ECEAPLVCR

SEQ ID NO: 2673 - protein, 9 aa, Homo sapiens
ISAPSIYAR

SEQ ID NO: 2674 - protein, 10 aa, Homo sapiens
APRSPCSARL

SEQ ID NO: 2675 - protein, 9 aa, Homo sapiens
SPRGPSSAT

SEQ ID NO: 2676 - protein, 8 aa, Homo sapiens
SPRMSGLL

SEQ ID NO: 2677 - protein, 9 aa, Homo sapiens
SPCALGAAL

SEQ ID NO: 2678 - protein, 9 aa, Homo sapiens
QPGAPAPDL

SEQ ID NO: 2679 - protein, 9 aa, Homo sapiens
VAGRRRLAA

SEQ ID NO: 2680 - protein, 10 aa, Homo sapiens
ALRCRCRAGF

SEQ ID NO: 2681 - protein, 10 aa, Homo sapiens
YMGARCEFPV

SEQ ID NO: 2682 - protein, 9 aa, Homo sapiens
YAREVATPL

SEQ ID NO: 2683 - protein, 9 aa, Homo sapiens
TPEPSVHAL

SEQ ID NO: 2684 - protein, 8 aa, Homo sapiens
YPSSILSV

SEQ ID NO: 2685 - protein, 8 aa, Homo sapiens
CLDLGHAL

SEQ ID NO: 2686 - protein, 8 aa, Homo sapiens
VILALIFL

SEQ ID NO: 2687 - protein, 9 aa, Homo sapiens
SQTVILALI

SEQ ID NO: 2688 - protein, 12 aa, Homo sapiens
RDAWPGTFSFII

SEQ ID NO: 2689 - protein, 9 aa, Homo sapiens
WELRFSYRA

SEQ ID NO: 2690 - protein, 10 aa, Homo sapiens
RDAWPGTFSF

SEQ ID NO: 2691 - protein, 10 aa, Homo sapiens
LSQTVILALI

SEQ ID NO: 2692 - protein, 9 aa, Homo sapiens
DQIGGGLCL

SEQ ID NO: 2693 - protein, 9 aa, Homo sapiens
PLPDGLLQV

SEQ ID NO: 2694 - protein, 9 aa, Homo sapiens
ALIFLPQTR

SEQ ID NO: 2695 - protein, 9 aa, Homo sapiens
YVISAPSIY

SEQ ID NO: 2696 - protein, 9 aa, Homo sapiens
YAREVATPL

SEQ ID NO: 2697 - protein, 10 aa, Homo sapiens
YAREVATPLF

SEQ ID NO: 2698 - protein, 9 aa, Homo sapiens
LLFPYPSSI

SEQ ID NO: 2699 - protein, 9 aa, Homo sapiens
DAWPGTFSF

SEQ ID NO: 2700 - protein, 9 aa, Homo sapiens
WARDIQRAG

SEQ ID NO: 2701 - protein, 9 aa, Homo sapiens
FIIETWREE

SEQ ID NO: 2702 - protein, 9 aa, Homo sapiens
LLPPALGLL

SEQ ID NO: 2703 - protein, 9 aa, Homo sapiens
YAREVATPL

SEQ ID NO: 2704 - protein, 9 aa, Homo sapiens
YLLPPALGL

SEQ ID NO: 2705 - protein, 9 aa, Homo sapiens
LLFPYPSSI

SEQ ID NO: 2706 - protein, 9 aa, Homo sapiens
VHPDGASAL

SEQ ID NO: 2707 - protein, 9 aa, Homo sapiens
ALPDALNNL

SEQ ID NO: 2708 - protein, 10 aa, Homo sapiens
SAPSRCGPGL

SEQ ID NO: 2709 - protein, 10 aa, Homo sapiens
TVPVSTSSCL

SEQ ID NO: 2710 - protein, 9 aa, Homo sapiens
YAREVATPL

SEQ ID NO: 2711 - protein, 9 aa, Homo sapiens
VATPLFPPL

SEQ ID NO: 2712 - protein, 9 aa, Homo sapiens
YLLPPALGL

SEQ ID NO: 2713 - protein, 9 aa, Homo sapiens
LLFPYPSSI

SEQ ID NO: 2714 - protein, 10 aa, Homo sapiens
FIIETWREEL

SEQ ID NO: 2715 - protein, 9 aa, Homo sapiens
YAHFSGLVC

SEQ ID NO: 2716 - protein, 9 aa, Homo sapiens
FRDAWPGTF

SEQ ID NO: 2717 - protein, 9 aa, Homo sapiens
LFPYPSSIL

SEQ ID NO: 2718 - protein, 9 aa, Homo sapiens
SQDAGSRLL

SEQ ID NO: 2719 - protein, 9 aa, Homo sapiens
LLPPALGLL

SEQ ID NO: 2720 - protein, 9 aa, Homo sapiens
VFELQIHSF

SEQ ID NO: 2721 - protein, 10 aa, Homo sapiens
SFECTCPRGF

SEQ ID NO: 2722 - protein, 9 aa, Homo sapiens
FRDAWPGTF

SEQ ID NO: 2723 - protein, 9 aa, Homo sapiens
TRPAGVFEL

SEQ ID NO: 2724 - protein, 9 aa, Homo sapiens
QRYLLPPAL

SEQ ID NO: 2725 - protein, 9 aa, Homo sapiens
FRVCLKPGL

SEQ ID NO: 2726 - protein, 9 aa, Homo sapiens
ARLPCRLFF

SEQ ID NO: 2727 - protein, 9 aa, Homo sapiens
RPGDPQRYL

SEQ ID NO: 2728 - protein, 9 aa, Homo sapiens
ARGPVYTEQ

SEQ ID NO: 2729 - protein, 8 aa, Homo sapiens
ARGPVYTE

SEQ ID NO: 2730 - protein, 9 aa, Homo sapiens
FRDAWPGTF

SEQ ID NO: 2731 - protein, 9 aa, Homo sapiens
TRPAGVFEL

SEQ ID NO: 2732 - protein, 9 aa, Homo sapiens
ARLPCRLFF

SEQ ID NO: 2733 - protein, 9 aa, Homo sapiens
QRYLLPPAL

SEQ ID NO: 2734 - protein, 9 aa, Homo sapiens
GYMGARCEF

SEQ ID NO: 2735 - protein, 9 aa, Homo sapiens
ARGPVYTEQ

SEQ ID NO: 2736 - protein, 9 aa, Homo sapiens
LRPGDPQRY

SEQ ID NO: 2737 - protein, 10 aa, Homo sapiens
FTDFVRPLNI

SEQ ID NO: 2738 - protein, 9 aa, Homo sapiens
GGDFQPSYY

SEQ ID NO: 2739 - protein, 10 aa, Homo sapiens
FGAEAAGSGY

SEQ ID NO: 2740 - protein, 12 aa, Homo sapiens
VSEPGGDFQPSY

SEQ ID NO: 2741 - protein, 9 aa, Homo sapiens
FTDFVRPLN

SEQ ID NO: 2742 - protein, 9 aa, Homo sapiens
YLPPPPPPL

SEQ ID NO: 2743 - protein, 9 aa, Homo sapiens
FLPPGYLSA

SEQ ID NO: 2744 - protein, 10 aa, Homo sapiens
FLPPGYLSAL

SEQ ID NO: 2745 - protein, 10 aa, Homo sapiens
SMHPYCPFPL

SEQ ID NO: 2746 - protein, 8 aa, Homo sapiens
YLSALHFL

SEQ ID NO: 2747 - protein, 10 aa, Homo sapiens
YLDAPPGVPL

SEQ ID NO: 2748 - protein, 9 aa, Homo sapiens
SLAGPPFGA

SEQ ID NO: 2749 - protein, 8 aa, Homo sapiens
YLDAPPGV

SEQ ID NO: 2750 - protein, 12 aa, Homo sapiens
YLISERQKIMAA

SEQ ID NO: 2751 - protein, 9 aa, Homo sapiens
GYLDAPPGV

SEQ ID NO: 2752 - protein, 9 aa, Homo sapiens
YLISERQKI

SEQ ID NO: 2753 - protein, 10 aa, Homo sapiens
KIMAAQKVLK

SEQ ID NO: 2754 - protein, 9 aa, Homo sapiens
IMAAQKVLK

SEQ ID NO: 2755 - protein, 12 aa, Homo sapiens
RQKIMAAQKVLK

SEQ ID NO: 2756 - protein, 10 aa, Homo sapiens
HPYCPFPLGY

SEQ ID NO: 2757 - protein, 9 aa, Homo sapiens
ALQPVLGGR

SEQ ID NO: 2758 - protein, 10 aa, Homo sapiens
KIMAAQKVLK

SEQ ID NO: 2759 - protein, 9 aa, Homo sapiens
IMAAQKVLK

SEQ ID NO: 2760 - protein, 9 aa, Homo sapiens
AALCAQGPK

SEQ ID NO: 2761 - protein, 9 aa, Homo sapiens
SSFSLTVLF

SEQ ID NO: 2762 - protein, 9 aa, Homo sapiens
RTVPGPLFT

SEQ ID NO: 2763 - protein, 9 aa, Homo sapiens
ACFFEQPPR

SEQ ID NO: 2764 - protein, 9 aa, Homo sapiens
GYLSALHFL

SEQ ID NO: 2765 - protein, 10 aa, Homo sapiens
PGYLSALHFL

SEQ ID NO: 2766 - protein, 8 aa, Homo sapiens
GYLSALHF

SEQ ID NO: 2767 - protein, 10 aa, Homo sapiens
YYLPPPPPPL

SEQ ID NO: 2768 - protein, 9 aa, Homo sapiens
PPPPPPSSF

SEQ ID NO: 2769 - protein, 9 aa, Homo sapiens
RGRNPGPRA

SEQ ID NO: 2770 - protein, 9 aa, Homo sapiens
RQKIMAAQK

SEQ ID NO: 2771 - protein, 9 aa, Homo sapiens
RCRNHGFLV

SEQ ID NO: 2772 - protein, 9 aa, Homo sapiens
RWKQCLCEK

SEQ ID NO: 2773 - protein, 10 aa, Homo sapiens
KCYLISERQK

SEQ ID NO: 2774 - protein, 9 aa, Homo sapiens
MVRTPKCSR

SEQ ID NO: 2775 - protein, 10 aa, Homo sapiens
CFFEQPPRGR

SEQ ID NO: 2776 - protein, 10 aa, Homo sapiens
KMVRTPKCSR

SEQ ID NO: 2777 - protein, 9 aa, Homo sapiens
EKCYLISER

SEQ ID NO: 2778 - protein, 9 aa, Homo sapiens
FFEQPPRGR

SEQ ID NO: 2779 - protein, 9 aa, Homo sapiens
DADPGPEGR

SEQ ID NO: 2780 - protein, 10 aa, Homo sapiens
RPMRTVPGPL

SEQ ID NO: 2781 - protein, 9 aa, Homo sapiens
VPAASLRPL

SEQ ID NO: 2782 - protein, 9 aa, Homo sapiens
GPLDLRRPM

SEQ ID NO: 2783 - protein, 10 aa, Homo sapiens
APVPVPAASL

SEQ ID NO: 2784 - protein, 9 aa, Homo sapiens
GPRALQPVL

SEQ ID NO: 2785 - protein, 12 aa, Homo sapiens
YLISERQKIMAA

SEQ ID NO: 2786 - protein, 9 aa, Homo sapiens
SERQKIMAA

SEQ ID NO: 2787 - protein, 10 aa, Homo sapiens
YLISERQKIM

SEQ ID NO: 2788 - protein, 8 aa, Homo sapiens
NINPDRAL

SEQ ID NO: 2789 - protein, 8 aa, Homo sapiens
CLCEKCYL

SEQ ID NO: 2790 - protein, 8 aa, Homo sapiens
VPVPAASL

SEQ ID NO: 2791 - protein, 9 aa, Homo sapiens
RNHGFLVPV

SEQ ID NO: 2792 - protein, 9 aa, Homo sapiens
GDFQPSYYL

SEQ ID NO: 2793 - protein, 10 aa, Homo sapiens
FTDFVRPLNI

SEQ ID NO: 2794 - protein, 9 aa, Homo sapiens
YLISERQKI

SEQ ID NO: 2795 - protein, 9 aa, Homo sapiens
SQYQGGGLV

SEQ ID NO: 2796 - protein, 10 aa, Homo sapiens
RQKIMAAQKV

SEQ ID NO: 2797 - protein, 9 aa, Homo sapiens
SSMHPYCPF

SEQ ID NO: 2798 - protein, 9 aa, Homo sapiens
SSFSLTVLF

SEQ ID NO: 2799 - protein, 9 aa, Homo sapiens
YLPPPPPPL

SEQ ID NO: 2800 - protein, 8 aa, Homo sapiens
SMHPYCPF

SEQ ID NO: 2801 - protein, 9 aa, Homo sapiens
FLPPGYLSA

SEQ ID NO: 2802 - protein, 9 aa, Homo sapiens
YLPPPPPPL

SEQ ID NO: 2803 - protein, 10 aa, Homo sapiens
FLPPGYLSAL

SEQ ID NO: 2804 - protein, 10 aa, Homo sapiens
YLDAPPGVPL

SEQ ID NO: 2805 - protein, 9 aa, Homo sapiens
YCPFPLGYL

SEQ ID NO: 2806 - protein, 9 aa, Homo sapiens
AAAPAPVPV

SEQ ID NO: 2807 - protein, 9 aa, Homo sapiens
AAAAAPAPV

SEQ ID NO: 2808 - protein, 9 aa, Homo sapiens
RAAVAMPSL

SEQ ID NO: 2809 - protein, 9 aa, Homo sapiens
SGYPGPLDL

SEQ ID NO: 2810 - protein, 9 aa, Homo sapiens
YLPPPPPPL

SEQ ID NO: 2811 - protein, 9 aa, Homo sapiens
YLPPPPPPL

SEQ ID NO: 2812 - protein, 10 aa, Homo sapiens
YLDAPPGVPL

SEQ ID NO: 2813 - protein, 10 aa, Homo sapiens
YYLPPPPPPL

SEQ ID NO: 2814 - protein, 8 aa, Homo sapiens
SFSLTVLF

SEQ ID NO: 2815 - protein, 9 aa, Homo sapiens
NTDDQDAEV

SEQ ID NO: 2816 - protein, 8 aa, Homo sapiens
FTDFVRPL

SEQ ID NO: 2817 - protein, 9 aa, Homo sapiens
FRHVSRSQY

SEQ ID NO: 2818 - protein, 9 aa, Homo sapiens
MRTVPGPLF

SEQ ID NO: 2819 - protein, 9 aa, Homo sapiens
GRNPGPRAL

SEQ ID NO: 2820 - protein, 9 aa, Homo sapiens
SGYPGPLDL

SEQ ID NO: 2821 - protein, 9 aa, Homo sapiens
CRNHGFLVP

SEQ ID NO: 2822 - protein, 9 aa, Homo sapiens
FRHVSRSQY

SEQ ID NO: 2823 - protein, 9 aa, Homo sapiens
MRTVPGPLF

SEQ ID NO: 2824 - protein, 9 aa, Homo sapiens
LFTDFVRPL

SEQ ID NO: 2825 - protein, 9 aa, Homo sapiens
GRNPGPRAL

SEQ ID NO: 2826 - protein, 9 aa, Homo sapiens
YLPPPPPPL

SEQ ID NO: 2827 - protein, 10 aa, Homo sapiens
ATLEDLDNLY

SEQ ID NO: 2828 - protein, 9 aa, Homo sapiens
TLEDLDNLY

SEQ ID NO: 2829 - protein, 9 aa, Homo sapiens
CTCISTTVY

SEQ ID NO: 2830 - protein, 12 aa, Homo sapiens
TLESINYDSETY

SEQ ID NO: 2831 - protein, 11 aa, Homo sapiens
VTAPTLESINY

SEQ ID NO: 2832 - protein, 10 aa, Homo sapiens
NLYNYENIPV

SEQ ID NO: 2833 - protein, 9 aa, Homo sapiens
TLAGLVLGL

SEQ ID NO: 2834 - protein, 10 aa, Homo sapiens
TLAGLVLGLV

SEQ ID NO: 2835 - protein, 10 aa, Homo sapiens
KTLAGLVLGL

SEQ ID NO: 2836 - protein, 9 aa, Homo sapiens
NLDHIPLPL

SEQ ID NO: 2837 - protein, 9 aa, Homo sapiens
YMCLPRLPV

SEQ ID NO: 2838 - protein, 10 aa, Homo sapiens
YLTDNNLDHI

SEQ ID NO: 2839 - protein, 9 aa, Homo sapiens
GLVIFDAAV

SEQ ID NO: 2840 - protein, 10 aa, Homo sapiens
LLCTCISTTV

SEQ ID NO: 2841 - protein, 9 aa, Homo sapiens
RLDGNPINL

SEQ ID NO: 2842 - protein, 9 aa, Homo sapiens
QLPELPTTL

SEQ ID NO: 2843 - protein, 10 aa, Homo sapiens
SLSDLKRIDL

SEQ ID NO: 2844 - protein, 9 aa, Homo sapiens
KLPQLRELV

SEQ ID NO: 2845 - protein, 10 aa, Homo sapiens
KDMYDLHHLY

SEQ ID NO: 2846 - protein, 11 aa, Homo sapiens
RLDGNPINLSK

SEQ ID NO: 2847 - protein, 9 aa, Homo sapiens
ISNNRLGRK

SEQ ID NO: 2848 - protein, 11 aa, Homo sapiens
HELDAIPPLPK

SEQ ID NO: 2849 - protein, 10 aa, Homo sapiens
ELDAIPPLPK

SEQ ID NO: 2850 - protein, 10 aa, Homo sapiens
TAYFYSRFNR

SEQ ID NO: 2851 - protein, 9 aa, Homo sapiens
ATVMPSGNR

SEQ ID NO: 2852 - protein, 9 aa, Homo sapiens
ISNNRLGRK

SEQ ID NO: 2853 - protein, 9 aa, Homo sapiens
LTPPPQPEK

SEQ ID NO: 2854 - protein, 11 aa, Homo sapiens
SRFNRIKKINK

SEQ ID NO: 2855 - protein, 9 aa, Homo sapiens
AYFYSRFNR

SEQ ID NO: 2856 - protein, 9 aa, Homo sapiens
YFYSRFNRI

SEQ ID NO: 2857 - protein, 10 aa, Homo sapiens
AYFYSRFNRI

SEQ ID NO: 2858 - protein, 10 aa, Homo sapiens
TYIRKALEDI

SEQ ID NO: 2859 - protein, 9 aa, Homo sapiens
PELPTTLTF

SEQ ID NO: 2860 - protein, 9 aa, Homo sapiens
MYDLHHLYL

SEQ ID NO: 2861 - protein, 9 aa, Homo sapiens
YSRFNRIKK

SEQ ID NO: 2862 - protein, 10 aa, Homo sapiens
RFNRIKKINK

SEQ ID NO: 2863 - protein, 10 aa, Homo sapiens
FYSRFNRIKK

SEQ ID NO: 2864 - protein, 10 aa, Homo sapiens
NVKNLTYIRK

SEQ ID NO: 2865 - protein, 10 aa, Homo sapiens
TAYFYSRFNR

SEQ ID NO: 2866 - protein, 9 aa, Homo sapiens
NVKNLTYIR

SEQ ID NO: 2867 - protein, 9 aa, Homo sapiens
AYFYSRFNR

SEQ ID NO: 2868 - protein, 9 aa, Homo sapiens
TFIDISNNR

SEQ ID NO: 2869 - protein, 9 aa, Homo sapiens
LPRLPVGSL

SEQ ID NO: 2870 - protein, 10 aa, Homo sapiens
CLPRLPVGSL

SEQ ID NO: 2871 - protein, 12 aa, Homo sapiens
YMCLPRLPVGSL

SEQ ID NO: 2872 - protein, 11 aa, Homo sapiens
MCLPRLPVGSL

SEQ ID NO: 2873 - protein, 10 aa, Homo sapiens
SPQEPEFTGV

SEQ ID NO: 2874 - protein, 10 aa, Homo sapiens
LPRLPVGSLV

SEQ ID NO: 2875 - protein, 9 aa, Homo sapiens
LPQLRELVL

SEQ ID NO: 2876 - protein, 8 aa, Homo sapiens
LTYIRKAL

SEQ ID NO: 2877 - protein, 9 aa, Homo sapiens
YFYSRFNRI

SEQ ID NO: 2878 - protein, 8 aa, Homo sapiens
DMYDLHHL

SEQ ID NO: 2879 - protein, 8 aa, Homo sapiens
LPELPTTL

SEQ ID NO: 2880 - protein, 8 aa, Homo sapiens
LPENLRAL

SEQ ID NO: 2881 - protein, 9 aa, Homo sapiens
HELDAIPPL

SEQ ID NO: 2882 - protein, 9 aa, Homo sapiens
YENIPVDKV

SEQ ID NO: 2883 - protein, 10 aa, Homo sapiens
RELVLRDNKI

SEQ ID NO: 2884 - protein, 9 aa, Homo sapiens
RQLPELPTT

SEQ ID NO: 2885 - protein, 9 aa, Homo sapiens
SRFNRIKKI

SEQ ID NO: 2886 - protein, 9 aa, Homo sapiens
KVEIEIATV

SEQ ID NO: 2887 - protein, 9 aa, Homo sapiens
LQNNNILEM

SEQ ID NO: 2888 - protein, 9 aa, Homo sapiens
LTSNLISEI

SEQ ID NO: 2889 - protein, 9 aa, Homo sapiens
LSKTPQAYM

SEQ ID NO: 2890 - protein, 9 aa, Homo sapiens
SINYDSETY

SEQ ID NO: 2891 - protein, 9 aa, Homo sapiens
FCNVKNLTY

SEQ ID NO: 2892 - protein, 8 aa, Homo sapiens
LSKTPQAY

SEQ ID NO: 2893 - protein, 9 aa, Homo sapiens
VMPSGNREL

SEQ ID NO: 2894 - protein, 9 aa, Homo sapiens
FIDISNNRL

SEQ ID NO: 2895 - protein, 9 aa, Homo sapiens
KTPQAYMCL

SEQ ID NO: 2896 - protein, 9 aa, Homo sapiens
QLPELPTTL

SEQ ID NO: 2897 - protein, 10 aa, Homo sapiens
FDAAVTAPTL

SEQ ID NO: 2898 - protein, 9 aa, Homo sapiens
LQNNNILEM

SEQ ID NO: 2899 - protein, 9 aa, Homo sapiens
VTAPTLESI

SEQ ID NO: 2900 - protein, 9 aa, Homo sapiens
TVYCDDHEL

SEQ ID NO: 2901 - protein, 8 aa, Homo sapiens
AAVTAPTL

SEQ ID NO: 2902 - protein, 9 aa, Homo sapiens
DAAVTAPTL

SEQ ID NO: 2903 - protein, 8 aa, Homo sapiens
KTLAGLVL

SEQ ID NO: 2904 - protein, 9 aa, Homo sapiens
MYDLHHLYL

SEQ ID NO: 2905 - protein, 9 aa, Homo sapiens
FIDISNNRL

SEQ ID NO: 2906 - protein, 9 aa, Homo sapiens
TYDATLEDL

SEQ ID NO: 2907 - protein, 9 aa, Homo sapiens
IFDAAVTAP

SEQ ID NO: 2908 - protein, 9 aa, Homo sapiens
SRFNRIKKI

SEQ ID NO: 2909 - protein, 9 aa, Homo sapiens
LRDNKIRQL

SEQ ID NO: 2910 - protein, 10 aa, Homo sapiens
FRKLPQLREL

SEQ ID NO: 2911 - protein, 9 aa, Homo sapiens
KRIDLTSNL

SEQ ID NO: 2912 - protein, 9 aa, Homo sapiens
YNYENIPVD

SEQ ID NO: 2913 - protein, 8 aa, Homo sapiens
RDNKIRQL

SEQ ID NO: 2914 - protein, 9 aa, Homo sapiens
MYDLHHLYL

SEQ ID NO: 2915 - protein, 9 aa, Homo sapiens
YFYSRFNRI

SEQ ID NO: 2916 - protein, 9 aa, Homo sapiens
LRDNKIRQL

SEQ ID NO: 2917 - protein, 8 aa, Homo sapiens
VYCDDHEL

SEQ ID NO: 2918 - protein, 9 aa, Homo sapiens
KRIDLTSNL

SEQ ID NO: 2919 - protein, 8 aa, Homo sapiens
NKNDFASL

SEQ ID NO: 2920 - protein, 10 aa, Homo sapiens
LTSLTILQLY

SEQ ID NO: 2921 - protein, 10 aa, Homo sapiens
IPTHEEHLFY

SEQ ID NO: 2922 - protein, 9 aa, Homo sapiens
PTHEEHLFY

SEQ ID NO: 2923 - protein, 9 aa, Homo sapiens
LSCRGGNNY

SEQ ID NO: 2924 - protein, 9 aa, Homo sapiens
FLFAVGFYL

SEQ ID NO: 2925 - protein, 10 aa, Homo sapiens
VLNIDLLWSV

SEQ ID NO: 2926 - protein, 10 aa, Homo sapiens
FLFAVGFYLL

SEQ ID NO: 2927 - protein, 10 aa, Homo sapiens
RLTWSFLWSV

SEQ ID NO: 2928 - protein, 10 aa, Homo sapiens
AMGASCVWYV

SEQ ID NO: 2929 - protein, 9 aa, Homo sapiens
FLWSVFWLI

SEQ ID NO: 2930 - protein, 9 aa, Homo sapiens
LTWSFLWSV

SEQ ID NO: 2931 - protein, 9 aa, Homo sapiens
NLFLFLFAV

SEQ ID NO: 2932 - protein, 9 aa, Homo sapiens
RLLCALTSL

SEQ ID NO: 2933 - protein, 10 aa, Homo sapiens
FIATHFPHQV

SEQ ID NO: 2934 - protein, 11 aa, Homo sapiens
FLWSVFWLIQI

SEQ ID NO: 2935 - protein, 8 aa, Homo sapiens
FLWSVFWL

SEQ ID NO: 2936 - protein, 9 aa, Homo sapiens
VLFGLGFAI

SEQ ID NO: 2937 - protein, 10 aa, Homo sapiens
HLFYVLSFCK

SEQ ID NO: 2938 - protein, 9 aa, Homo sapiens
MLMKQSGKK

SEQ ID NO: 2939 - protein, 9 aa, Homo sapiens
LLWSVPIAK

SEQ ID NO: 2940 - protein, 11 aa, Homo sapiens
VIGDWLNLIFK

SEQ ID NO: 2941 - protein, 10 aa, Homo sapiens
LLWSVPIAKK

SEQ ID NO: 2942 - protein, 10 aa, Homo sapiens
QTASLGTYLK

SEQ ID NO: 2943 - protein, 10 aa, Homo sapiens
HLFYVLSFCK

SEQ ID NO: 2944 - protein, 9 aa, Homo sapiens
TASLGTYLK

SEQ ID NO: 2945 - protein, 10 aa, Homo sapiens
GVLIIQHLQK

SEQ ID NO: 2946 - protein, 12 aa, Homo sapiens
AVIGDWLNLIFK

SEQ ID NO: 2947 - protein, 9 aa, Homo sapiens
AVGFYLLLR

SEQ ID NO: 2948 - protein, 10 aa, Homo sapiens
TYLKTNLFLF

SEQ ID NO: 2949 - protein, 9 aa, Homo sapiens
IYFPLCFQF

SEQ ID NO: 2950 - protein, 9 aa, Homo sapiens
TWSFLWSVF

SEQ ID NO: 2951 - protein, 9 aa, Homo sapiens
NYTLSFRLL

SEQ ID NO: 2952 - protein, 10 aa, Homo sapiens
KDYRAYYTFL

SEQ ID NO: 2953 - protein, 9 aa, Homo sapiens
GTKMIWVAV

SEQ ID NO: 2954 - protein, 10 aa, Homo sapiens
KTNLFLFLFA

SEQ ID NO: 2955 - protein, 9 aa, Homo sapiens
WLNLIFKWK

SEQ ID NO: 2956 - protein, 10 aa, Homo sapiens
SVFWLIQISV

SEQ ID NO: 2957 - protein, 10 aa, Homo sapiens
IFKWILFGHR

SEQ ID NO: 2958 - protein, 10 aa, Homo sapiens
NSEMFLLSCR

SEQ ID NO: 2959 - protein, 9 aa, Homo sapiens
FMSNVGDPR

SEQ ID NO: 2960 - protein, 9 aa, Homo sapiens
DKFSITLHR

SEQ ID NO: 2961 - protein, 8 aa, Homo sapiens
EMFLLSCR

SEQ ID NO: 2962 - protein, 8 aa, Homo sapiens
NNYTLSFR

SEQ ID NO: 2963 - protein, 9 aa, Homo sapiens
TPGIQTASL

SEQ ID NO: 2964 - protein, 9 aa, Homo sapiens
YPNHSSPCL

SEQ ID NO: 2965 - protein, 9 aa, Homo sapiens
IPYSVHMLM

SEQ ID NO: 2966 - protein, 10 aa, Homo sapiens
HTPGIQTASL

SEQ ID NO: 2967 - protein, 9 aa, Homo sapiens
RPYWWVQET

SEQ ID NO: 2968 - protein, 9 aa, Homo sapiens
YLLLRVLNI

SEQ ID NO: 2969 - protein, 8 aa, Homo sapiens
FLHRNGVL

SEQ ID NO: 2970 - protein, 9 aa, Homo sapiens
NLIFKWKSI

SEQ ID NO: 2971 - protein, 8 aa, Homo sapiens
NLIFKWIL

SEQ ID NO: 2972 - protein, 9 aa, Homo sapiens
NLIFKWILF

SEQ ID NO: 2973 - protein, 9 aa, Homo sapiens
IDLLWSVPI

SEQ ID NO: 2974 - protein, 12 aa, Homo sapiens
MDFLHRNGVLII

SEQ ID NO: 2975 - protein, 11 aa, Homo sapiens
MDFLHRNGVLI

SEQ ID NO: 2976 - protein, 9 aa, Homo sapiens
FLWSVFWLI

SEQ ID NO: 2977 - protein, 9 aa, Homo sapiens
WLIQISVCI

SEQ ID NO: 2978 - protein, 9 aa, Homo sapiens
SIWPCNGRI

SEQ ID NO: 2979 - protein, 9 aa, Homo sapiens
WIHIDTTPF

SEQ ID NO: 2980 - protein, 9 aa, Homo sapiens
FAINSEMFL

SEQ ID NO: 2981 - protein, 9 aa, Homo sapiens
RAYYTFLNF

SEQ ID NO: 2982 - protein, 9 aa, Homo sapiens
ISRVFIATH

SEQ ID NO: 2983 - protein, 8 aa, Homo sapiens
LQKDYRAY

SEQ ID NO: 2984 - protein, 9 aa, Homo sapiens
FIPYSVHML

SEQ ID NO: 2985 - protein, 9 aa, Homo sapiens
FAINSEMFL

SEQ ID NO: 2986 - protein, 9 aa, Homo sapiens
GMDKFSITL

SEQ ID NO: 2987 - protein, 9 aa, Homo sapiens
IWPCNGRIL

SEQ ID NO: 2988 - protein, 10 aa, Homo sapiens
HTPGIQTASL

SEQ ID NO: 2989 - protein, 9 aa, Homo sapiens
FAINSEMFL

SEQ ID NO: 2990 - protein, 9 aa, Homo sapiens
FAVGFYLLL

SEQ ID NO: 2991 - protein, 9 aa, Homo sapiens
LSFCKSASI

SEQ ID NO: 2992 - protein, 8 aa, Homo sapiens
FAVGFYLL

SEQ ID NO: 2993 - protein, 9 aa, Homo sapiens
IGDWLNLIF

SEQ ID NO: 2994 - protein, 9 aa, Homo sapiens
VGDPRNIFF

SEQ ID NO: 2995 - protein, 9 aa, Homo sapiens
YPNHSSPCL

SEQ ID NO: 2996 - protein, 9 aa, Homo sapiens
FFIYFPLCF

SEQ ID NO: 2997 - protein, 9 aa, Homo sapiens
AFIPYSVHM

SEQ ID NO: 2998 - protein, 9 aa, Homo sapiens
HRHAGGRGL

SEQ ID NO: 2999 - protein, 10 aa, Homo sapiens
YRAYYTFLNF

SEQ ID NO: 3000 - protein, 9 aa, Homo sapiens
LRVLNIDLL

SEQ ID NO: 3001 - protein, 9 aa, Homo sapiens
CRGGNNYTL

SEQ ID NO: 3002 - protein, 9 aa, Homo sapiens
NRCPEPHCL

SEQ ID NO: 3003 - protein, 9 aa, Homo sapiens
THFPHQVIL

SEQ ID NO: 3004 - protein, 10 aa, Homo sapiens
YRAYYTFLNF

SEQ ID NO: 3005 - protein, 9 aa, Homo sapiens
AYYTFLNFM

SEQ ID NO: 3006 - protein, 9 aa, Homo sapiens
LRVLNIDLL

SEQ ID NO: 3007 - protein, 9 aa, Homo sapiens
SRVFIATHF

SEQ ID NO: 3008 - protein, 9 aa, Homo sapiens
IYFPLCFQF

SEQ ID NO: 3009 - protein, 9 aa, Homo sapiens
NRCPEPHCL

SEQ ID NO: 3010 - protein, 9 aa, Homo sapiens
ATDLEKHPY

SEQ ID NO: 3011 - protein, 10 aa, Homo sapiens
TATDLEKHPY

SEQ ID NO: 3012 - protein, 12 aa, Homo sapiens
WSTATDLEKHPY

SEQ ID NO: 3013 - protein, 8 aa, Homo sapiens
YFEELELY

SEQ ID NO: 3014 - protein, 11 aa, Homo sapiens
VSSYVHFLLNY

SEQ ID NO: 3015 - protein, 9 aa, Homo sapiens
YQEEMMNYV

SEQ ID NO: 3016 - protein, 9 aa, Homo sapiens
LLFCQDHYA

SEQ ID NO: 3017 - protein, 10 aa, Homo sapiens
FLLFCQDHYA

SEQ ID NO: 3018 - protein, 12 aa, Homo sapiens
FLLFCQDHYAQL

SEQ ID NO: 3019 - protein, 9 aa, Homo sapiens
KMWSTATDL

SEQ ID NO: 3020 - protein, 11 aa, Homo sapiens
LLFCQDHYAQL

SEQ ID NO: 3021 - protein, 9 aa, Homo sapiens
NVSSYVHFL

SEQ ID NO: 3022 - protein, 10 aa, Homo sapiens
LLRAKYFEEL

SEQ ID NO: 3023 - protein, 11 aa, Homo sapiens
SFLLFCQDHYA

SEQ ID NO: 3024 - protein, 9 aa, Homo sapiens
AKYEALAKL

SEQ ID NO: 3025 - protein, 9 aa, Homo sapiens
FCQDHYAQL

SEQ ID NO: 3026 - protein, 9 aa, Homo sapiens
FLLNYRNKF

SEQ ID NO: 3027 - protein, 8 aa, Homo sapiens
ALAKLDKA

SEQ ID NO: 3028 - protein, 9 aa, Homo sapiens
LLNYRNKFK

SEQ ID NO: 3029 - protein, 9 aa, Homo sapiens
MMNYVGKRK

SEQ ID NO: 3030 - protein, 10 aa, Homo sapiens
MMNYVGKRKK

SEQ ID NO: 3031 - protein, 10 aa, Homo sapiens
SSYVHFLLNY

SEQ ID NO: 3032 - protein, 8 aa, Homo sapiens
RVALLRAK

SEQ ID NO: 3033 - protein, 9 aa, Homo sapiens
RVALLRAKY

SEQ ID NO: 3034 - protein, 10 aa, Homo sapiens
SSYVHFLLNY

SEQ ID NO: 3035 - protein, 11 aa, Homo sapiens
SSYVHFLLNYR

SEQ ID NO: 3036 - protein, 10 aa, Homo sapiens
YVGFKEFSRK

SEQ ID NO: 3037 - protein, 10 aa, Homo sapiens
SYVHFLLNYR

SEQ ID NO: 3038 - protein, 8 aa, Homo sapiens
STATDLEK

SEQ ID NO: 3039 - protein, 11 aa, Homo sapiens
SVVQVAKATGK

SEQ ID NO: 3040 - protein, 9 aa, Homo sapiens
VGFKEFSRK

SEQ ID NO: 3041 - protein, 10 aa, Homo sapiens
RYQEEMMNYV

SEQ ID NO: 3042 - protein, 10 aa, Homo sapiens
HFLLNYRNKF

SEQ ID NO: 3043 - protein, 9 aa, Homo sapiens
RPPSSFLLF

SEQ ID NO: 3044 - protein, 9 aa, Homo sapiens
KYFEELELY

SEQ ID NO: 3045 - protein, 10 aa, Homo sapiens
RRPPSSFLLF

SEQ ID NO: 3046 - protein, 9 aa, Homo sapiens
KAKYEALAK

SEQ ID NO: 3047 - protein, 9 aa, Homo sapiens
SARNRCRGK

SEQ ID NO: 3048 - protein, 9 aa, Homo sapiens
KYRMSARNR

SEQ ID NO: 3049 - protein, 12 aa, Homo sapiens
KARYQEEMMNYV

SEQ ID NO: 3050 - protein, 9 aa, Homo sapiens
SEKWRSISK

SEQ ID NO: 3051 - protein, 9 aa, Homo sapiens
HFLLNYRNK

SEQ ID NO: 3052 - protein, 9 aa, Homo sapiens
YVHFLLNYR

SEQ ID NO: 3053 - protein, 10 aa, Homo sapiens
SYVHFLLNYR

SEQ ID NO: 3054 - protein, 10 aa, Homo sapiens
TYVGFKEFSR

SEQ ID NO: 3055 - protein, 9 aa, Homo sapiens
NYVGKRKKR

SEQ ID NO: 3056 - protein, 9 aa, Homo sapiens
EMMNYVGKR

SEQ ID NO: 3057 - protein, 9 aa, Homo sapiens
HPYEQRVAL

SEQ ID NO: 3058 - protein, 10 aa, Homo sapiens
KHPYEQRVAL

SEQ ID NO: 3059 - protein, 10 aa, Homo sapiens
HPYEQRVALL

SEQ ID NO: 3060 - protein, 9 aa, Homo sapiens
EPRRPPSSF

SEQ ID NO: 3061 - protein, 9 aa, Homo sapiens
RPPSSFLLF

SEQ ID NO: 3062 - protein, 10 aa, Homo sapiens
LLRAKYFEEL

SEQ ID NO: 3063 - protein, 12 aa, Homo sapiens
LLRAKYFEELEL

SEQ ID NO: 3064 - protein, 9 aa, Homo sapiens
HPYEQRVAL

SEQ ID NO: 3065 - protein, 9 aa, Homo sapiens
HEKAKYEAL

SEQ ID NO: 3066 - protein, 9 aa, Homo sapiens
EIQLKPKAN

SEQ ID NO: 3067 - protein, 9 aa, Homo sapiens
RENPNWSVV

SEQ ID NO: 3068 - protein, 9 aa, Homo sapiens
YQEEMMNYV

SEQ ID NO: 3069 - protein, 9 aa, Homo sapiens
KEQQPNTYV

SEQ ID NO: 3070 - protein, 9 aa, Homo sapiens
EKHPYEQRV

SEQ ID NO: 3071 - protein, 9 aa, Homo sapiens
AKYFEELEL

SEQ ID NO: 3072 - protein, 9 aa, Homo sapiens
IQLKPKANV

SEQ ID NO: 3073 - protein, 10 aa, Homo sapiens
SSYVHFLLNY

SEQ ID NO: 3074 - protein, 9 aa, Homo sapiens
FLLNYRNKF

SEQ ID NO: 3075 - protein, 9 aa, Homo sapiens
NTYVGFKEF

SEQ ID NO: 3076 - protein, 9 aa, Homo sapiens
LAKLDKARY

SEQ ID NO: 3077 - protein, 9 aa, Homo sapiens
RPPSSFLLF

SEQ ID NO: 3078 - protein, 9 aa, Homo sapiens
VSSYVHFLL

SEQ ID NO: 3079 - protein, 9 aa, Homo sapiens
KMWSTATDL

SEQ ID NO: 3080 - protein, 8 aa, Homo sapiens
RRPPSSFL

SEQ ID NO: 3081 - protein, 10 aa, Homo sapiens
KHPYEQRVAL

SEQ ID NO: 3082 - protein, 9 aa, Homo sapiens
VSSYVHFLL

SEQ ID NO: 3083 - protein, 9 aa, Homo sapiens
HPYEQRVAL

SEQ ID NO: 3084 - protein, 9 aa, Homo sapiens
FCQDHYAQL

SEQ ID NO: 3085 - protein, 8 aa, Homo sapiens
SSYVHFLL

SEQ ID NO: 3086 - protein, 9 aa, Homo sapiens
RPPSSFLLF

SEQ ID NO: 3087 - protein, 9 aa, Homo sapiens
YQEEMMNYV

SEQ ID NO: 3088 - protein, 9 aa, Homo sapiens
RRPPSSFLL

SEQ ID NO: 3089 - protein, 8 aa, Homo sapiens
YFEELELY

SEQ ID NO: 3090 - protein, 8 aa, Homo sapiens
KYFEELEL

SEQ ID NO: 3091 - protein, 8 aa, Homo sapiens
KYEALAKL

SEQ ID NO: 3092 - protein, 9 aa, Homo sapiens
RRPPSSFLL

SEQ ID NO: 3093 - protein, 9 aa, Homo sapiens
LRAKYFEEL

SEQ ID NO: 3094 - protein, 9 aa, Homo sapiens
NVSSYVHFL

SEQ ID NO: 3095 - protein, 8 aa, Homo sapiens
RRPPSSFL

SEQ ID NO: 3096 - protein, 9 aa, Homo sapiens
RRPPSSFLL

SEQ ID NO: 3097 - protein, 9 aa, Homo sapiens
LRAKYFEEL

SEQ ID NO: 3098 - protein, 10 aa, Homo sapiens
RRPPSSFLLF

SEQ ID NO: 3099 - protein, 8 aa, Homo sapiens
KYFEELEL

SEQ ID NO: 3100 - protein, 9 aa, Homo sapiens
SYVHFLLNY

SEQ ID NO: 3101 - protein, 9 aa, Homo sapiens
STNVGSNTY

SEQ ID NO: 3102 - protein, 10 aa, Homo sapiens
SSTNVGSNTY

SEQ ID NO: 3103 - protein, 11 aa, Homo sapiens
LSSTNVGSNTY

SEQ ID NO: 3104 - protein, 9 aa, Homo sapiens
VLKREPLNY

SEQ ID NO: 3105 - protein, 9 aa, Homo sapiens
FLIVLSVAL

SEQ ID NO: 3106 - protein, 10 aa, Homo sapiens
VLSRNILLEL

SEQ ID NO: 3107 - protein, 10 aa, Homo sapiens
VFLIVLSVAL

SEQ ID NO: 3108 - protein, 9 aa, Homo sapiens
VLSVALNHL

SEQ ID NO: 3109 - protein, 9 aa, Homo sapiens
GILKLQVFL

SEQ ID NO: 3110 - protein, 9 aa, Homo sapiens
KLQVFLIVL

SEQ ID NO: 3111 - protein, 10 aa, Homo sapiens
CLDQIPIFTV

SEQ ID NO: 3112 - protein, 8 aa, Homo sapiens
RQEWIIPV

SEQ ID NO: 3113 - protein, 10 aa, Homo sapiens
MGILKLQVFL

SEQ ID NO: 3114 - protein, 9 aa, Homo sapiens
TVFQENHQV

SEQ ID NO: 3115 - protein, 9 aa, Homo sapiens
RLANFLVHS

SEQ ID NO: 3116 - protein, 9 aa, Homo sapiens
CLDQIPIFT

SEQ ID NO: 3117 - protein, 10 aa, Homo sapiens
VLSVALNHLK

SEQ ID NO: 3118 - protein, 9 aa, Homo sapiens
ILLELRGAK

SEQ ID NO: 3119 - protein, 11 aa, Homo sapiens
IVLSVALNHLK

SEQ ID NO: 3120 - protein, 11 aa, Homo sapiens
TVFQENHQVEK

SEQ ID NO: 3121 - protein, 9 aa, Homo sapiens
IVLSVALNH

SEQ ID NO: 3122 - protein, 9 aa, Homo sapiens
LSVALNHLK

SEQ ID NO: 3123 - protein, 10 aa, Homo sapiens
VLSVALNHLK

SEQ ID NO: 3124 - protein, 11 aa, Homo sapiens
IVLSVALNHLK

SEQ ID NO: 3125 - protein, 11 aa, Homo sapiens
TVFQENHQVEK

SEQ ID NO: 3126 - protein, 8 aa, Homo sapiens
ATLPHVQR

SEQ ID NO: 3127 - protein, 11 aa, Homo sapiens
ATPIESHQVEK

SEQ ID NO: 3128 - protein, 9 aa, Homo sapiens
RWKSGNATL

SEQ ID NO: 3129 - protein, 9 aa, Homo sapiens
VQRSAWQIF

SEQ ID NO: 3130 - protein, 10 aa, Homo sapiens
NFLVHSSNNF

SEQ ID NO: 3131 - protein, 10 aa, Homo sapiens
LDQIPIFTVF

SEQ ID NO: 3132 - protein, 9 aa, Homo sapiens
DQIPIFTVF

SEQ ID NO: 3133 - protein, 9 aa, Homo sapiens
RCLDQIPIF

SEQ ID NO: 3134 - protein, 9 aa, Homo sapiens
KSKVIRWKS

SEQ ID NO: 3135 - protein, 10 aa, Homo sapiens
ATQRLANFLV

SEQ ID NO: 3136 - protein, 10 aa, Homo sapiens
KVIRWKSGNA

SEQ ID NO: 3137 - protein, 12 aa, Homo sapiens
KSKVIRWKSGNA

SEQ ID NO: 3138 - protein, 8 aa, Homo sapiens
KSKVIRWK

SEQ ID NO: 3139 - protein, 9 aa, Homo sapiens
QVFLIVLSV

SEQ ID NO: 3140 - protein, 9 aa, Homo sapiens
RWKSGNATL

SEQ ID NO: 3141 - protein, 9 aa, Homo sapiens
NATLPHVQR

SEQ ID NO: 3142 - protein, 9 aa, Homo sapiens
NTATCATQR

SEQ ID NO: 3143 - protein, 9 aa, Homo sapiens
HLKATPIER

SEQ ID NO: 3144 - protein, 9 aa, Homo sapiens
EWIIPVLSR

SEQ ID NO: 3145 - protein, 9 aa, Homo sapiens
IPVLSRNIL

SEQ ID NO: 3146 - protein, 10 aa, Homo sapiens
IPVLSRNILL

SEQ ID NO: 3147 - protein, 10 aa, Homo sapiens
IIPVLSRNIL

SEQ ID NO: 3148 - protein, 9 aa, Homo sapiens
LPHVQRSAW

SEQ ID NO: 3149 - protein, 9 aa, Homo sapiens
LNHLKATPI

SEQ ID NO: 3150 - protein, 9 aa, Homo sapiens
MGILKLQVF

SEQ ID NO: 3151 - protein, 10 aa, Homo sapiens
MGILKLQVFL

SEQ ID NO: 3152 - protein, 9 aa, Homo sapiens
ILKLQVFLI

SEQ ID NO: 3153 - protein, 8 aa, Homo sapiens
ILKLQVFL

SEQ ID NO: 3154 - protein, 8 aa, Homo sapiens
GILKLQVF

SEQ ID NO: 3155 - protein, 9 aa, Homo sapiens
LDQIPIFTV

SEQ ID NO: 3156 - protein, 10 aa, Homo sapiens
IERQEWIIPV

SEQ ID NO: 3157 - protein, 9 aa, Homo sapiens
TQRLANFLV

SEQ ID NO: 3158 - protein, 10 aa, Homo sapiens
IERCLDQIPI

SEQ ID NO: 3159 - protein, 9 aa, Homo sapiens
RQEWIIPVL

SEQ ID NO: 3160 - protein, 8 aa, Homo sapiens
DQIPIFTV

SEQ ID NO: 3161 - protein, 9 aa, Homo sapiens
HVQRSAWQI

SEQ ID NO: 3162 - protein, 9 aa, Homo sapiens
FLVHSSNNF

SEQ ID NO: 3163 - protein, 9 aa, Homo sapiens
STNVGSNTY

SEQ ID NO: 3164 - protein, 9 aa, Homo sapiens
HSSNNFGAI

SEQ ID NO: 3165 - protein, 9 aa, Homo sapiens
VQRSAWQIF

SEQ ID NO: 3166 - protein, 9 aa, Homo sapiens
FLIVLSVAL

SEQ ID NO: 3167 - protein, 9 aa, Homo sapiens
SSNNFGAIL

SEQ ID NO: 3168 - protein, 9 aa, Homo sapiens
LSRNILLEL

SEQ ID NO: 3169 - protein, 9 aa, Homo sapiens
HSSNNFGAI

SEQ ID NO: 3170 - protein, 9 aa, Homo sapiens
IIPVLSRNI

SEQ ID NO: 3171 - protein, 9 aa, Homo sapiens
REPLNYLPL

SEQ ID NO: 3172 - protein, 10 aa, Homo sapiens
TLPHVQRSAW

SEQ ID NO: 3173 - protein, 9 aa, Homo sapiens
VLSVALNHL

SEQ ID NO: 3174 - protein, 9 aa, Homo sapiens
HSSNNFGAI

SEQ ID NO: 3175 - protein, 9 aa, Homo sapiens
SSNNFGAIL

SEQ ID NO: 3176 - protein, 9 aa, Homo sapiens
FLIVLSVAL

SEQ ID NO: 3177 - protein, 9 aa, Homo sapiens
KATPIERCL

SEQ ID NO: 3178 - protein, 9 aa, Homo sapiens
RQEWIIPVL

SEQ ID NO: 3179 - protein, 9 aa, Homo sapiens
SSNNFGAIL

SEQ ID NO: 3180 - protein, 9 aa, Homo sapiens
RWKSGNATL

SEQ ID NO: 3181 - protein, 9 aa, Homo sapiens
HSSNNFGAI

SEQ ID NO: 3182 - protein, 9 aa, Homo sapiens
FLIVLSVAL

SEQ ID NO: 3183 - protein, 8 aa, Homo sapiens
CLDQIPIF

SEQ ID NO: 3184 - protein, 9 aa, Homo sapiens
VLSVALNHL

SEQ ID NO: 3185 - protein, 9 aa, Homo sapiens
ERQEWIIPV

SEQ ID NO: 3186 - protein, 9 aa, Homo sapiens
NTYGKRNAV

SEQ ID NO: 3187 - protein, 9 aa, Homo sapiens
LKREPLNYL

SEQ ID NO: 3188 - protein, 8 aa, Homo sapiens
KRNAVEVL

SEQ ID NO: 3189 - protein, 8 aa, Homo sapiens
SRNILLEL

SEQ ID NO: 3190 - protein, 9 aa, Homo sapiens
RQEWIIPVL

SEQ ID NO: 3191 - protein, 9 aa, Homo sapiens
ERQEWIIPV

SEQ ID NO: 3192 - protein, 9 aa, Homo sapiens
LKREPLNYL

SEQ ID NO: 3193 - protein, 9 aa, Homo sapiens
RWKSGNATL

SEQ ID NO: 3194 - protein, 8 aa, Homo sapiens
KRNAVEVL

SEQ ID NO: 3195 - protein, 8 aa, Homo sapiens
SRNILLEL

SEQ ID NO: 3196 - protein, 8 aa, Homo sapiens
KREPLNYL

SEQ ID NO: 3197 - protein, 9 aa, Homo sapiens
FGDIQEGIY

SEQ ID NO: 3198 - protein, 9 aa, Homo sapiens
VTEINRENY

SEQ ID NO: 3199 - protein, 11 aa, Homo sapiens
STYEKLDLKVY

SEQ ID NO: 3200 - protein, 9 aa, Homo sapiens
PSDNVVMVH

SEQ ID NO: 3201 - protein, 12 aa, Homo sapiens
TSCENTLNTLRY

SEQ ID NO: 3202 - protein, 9 aa, Homo sapiens
KIDLETILL

SEQ ID NO: 3203 - protein, 9 aa, Homo sapiens
YQFTAQPLV

SEQ ID NO: 3204 - protein, 9 aa, Homo sapiens
KVYGTFFEI

SEQ ID NO: 3205 - protein, 9 aa, Homo sapiens
KLLLADLHV

SEQ ID NO: 3206 - protein, 10 aa, Homo sapiens
YALVAQDVFL

SEQ ID NO: 3207 - protein, 9 aa, Homo sapiens
ALKECILAL

SEQ ID NO: 3208 - protein, 9 aa, Homo sapiens
IMHGKFSLV

SEQ ID NO: 3209 - protein, 9 aa, Homo sapiens
ALVAQDVFL

SEQ ID NO: 3210 - protein, 10 aa, Homo sapiens
ALVAQDVFLL

SEQ ID NO: 3211 - protein, 10 aa, Homo sapiens
RIMHGKFSLV

SEQ ID NO: 3212 - protein, 8 aa, Homo sapiens
LLLADLHV

SEQ ID NO: 3213 - protein, 10 aa, Homo sapiens
TLKDLDIITV

SEQ ID NO: 3214 - protein, 9 aa, Homo sapiens
HLDSSKISV

SEQ ID NO: 3215 - protein, 9 aa, Homo sapiens
ALTEIQKKL

SEQ ID NO: 3216 - protein, 10 aa, Homo sapiens
GLQEKEVCCV

SEQ ID NO: 3217 - protein, 9 aa, Homo sapiens
TLLGKDTTI

SEQ ID NO: 3218 - protein, 9 aa, Homo sapiens
VLEDGNQQI

SEQ ID NO: 3219 - protein, 8 aa, Homo sapiens
CLWEIQKL

SEQ ID NO: 3220 - protein, 9 aa, Homo sapiens
KVYDLLNWK

SEQ ID NO: 3221 - protein, 10 aa, Homo sapiens
LLLRNSTYEK

SEQ ID NO: 3222 - protein, 10 aa, Homo sapiens
KVYDLLNWKK

SEQ ID NO: 3223 - protein, 10 aa, Homo sapiens
RVPSKPCLMK

SEQ ID NO: 3224 - protein, 10 aa, Homo sapiens
KVYGTFFEIY

SEQ ID NO: 3225 - protein, 9 aa, Homo sapiens
STYEKLDLK

SEQ ID NO: 3226 - protein, 9 aa, Homo sapiens
STYEKLDLK

SEQ ID NO: 3227 - protein, 9 aa, Homo sapiens
KVYDLLNWK

SEQ ID NO: 3228 - protein, 10 aa, Homo sapiens
VETLPTLLGK

SEQ ID NO: 3229 - protein, 10 aa, Homo sapiens
KVYDLLNWKK

SEQ ID NO: 3230 - protein, 10 aa, Homo sapiens
GTFFEIYGGK

SEQ ID NO: 3231 - protein, 8 aa, Homo sapiens
AVFQIILK

SEQ ID NO: 3232 - protein, 10 aa, Homo sapiens
RQLEGAEINK

SEQ ID NO: 3233 - protein, 10 aa, Homo sapiens
RYLQNQTFCF

SEQ ID NO: 3234 - protein, 10 aa, Homo sapiens
IYALVAQDVF

SEQ ID NO: 3235 - protein, 10 aa, Homo sapiens
IYGGKVYDLL

SEQ ID NO: 3236 - protein, 9 aa, Homo sapiens
VYQFTAQPL

SEQ ID NO: 3237 - protein, 9 aa, Homo sapiens
IYGGKVYDL

SEQ ID NO: 3238 - protein, 9 aa, Homo sapiens
RYANRVKKL

SEQ ID NO: 3239 - protein, 10 aa, Homo sapiens
RTSRQTPVNA

SEQ ID NO: 3240 - protein, 9 aa, Homo sapiens
RVKKLNVDV

SEQ ID NO: 3241 - protein, 10 aa, Homo sapiens
RSDKRIHLAV

SEQ ID NO: 3242 - protein, 9 aa, Homo sapiens
LLRNSTYEK

SEQ ID NO: 3243 - protein, 9 aa, Homo sapiens
KVYDLLNWK

SEQ ID NO: 3244 - protein, 9 aa, Homo sapiens
RSLSILEQK

SEQ ID NO: 3245 - protein, 9 aa, Homo sapiens
TFFEIYGGK

SEQ ID NO: 3246 - protein, 10 aa, Homo sapiens
KVYDLLNWKK

SEQ ID NO: 3247 - protein, 9 aa, Homo sapiens
IMHMIEEYR

SEQ ID NO: 3248 - protein, 10 aa, Homo sapiens
EIMHMIEEYR

SEQ ID NO: 3249 - protein, 10 aa, Homo sapiens
HYPIGHEAPR

SEQ ID NO: 3250 - protein, 9 aa, Homo sapiens
NVDVRPYHR

SEQ ID NO: 3251 - protein, 9 aa, Homo sapiens
QWLENIQER

SEQ ID NO: 3252 - protein, 9 aa, Homo sapiens
EGIYVAIQR

SEQ ID NO: 3253 - protein, 9 aa, Homo sapiens
EIQKLQEQR

SEQ ID NO: 3254 - protein, 10 aa, Homo sapiens
RPYHRGHYPI

SEQ ID NO: 3255 - protein, 10 aa, Homo sapiens
RPLNQRETTL

SEQ ID NO: 3256 - protein, 11 aa, Homo sapiens
HPMPPPPLSPL

SEQ ID NO: 3257 - protein, 10 aa, Homo sapiens
TPFRASKLTL

SEQ ID NO: 3258 - protein, 9 aa, Homo sapiens
MPPPPLSPL

SEQ ID NO: 3259 - protein, 11 aa, Homo sapiens
MPPPPLSPLAL

SEQ ID NO: 3260 - protein, 8 aa, Homo sapiens
HPMPPPPL

SEQ ID NO: 3261 - protein, 10 aa, Homo sapiens
LMKQKKSPCL

SEQ ID NO: 3262 - protein, 9 aa, Homo sapiens
LMKQKKSPC

SEQ ID NO: 3263 - protein, 10 aa, Homo sapiens
RPYHRGHYPI

SEQ ID NO: 3264 - protein, 8 aa, Homo sapiens
EIRARRAL

SEQ ID NO: 3265 - protein, 9 aa, Homo sapiens
NWKKKLQVL

SEQ ID NO: 3266 - protein, 9 aa, Homo sapiens
EIQKKLKLL

SEQ ID NO: 3267 - protein, 8 aa, Homo sapiens
ESKQKVDL

SEQ ID NO: 3268 - protein, 9 aa, Homo sapiens
ALKECILAL

SEQ ID NO: 3269 - protein, 9 aa, Homo sapiens
YQFTAQPLV

SEQ ID NO: 3270 - protein, 9 aa, Homo sapiens
KVYGTFFEI

SEQ ID NO: 3271 - protein, 12 aa, Homo sapiens
LDLKVYGTFFEI

SEQ ID NO: 3272 - protein, 11 aa, Homo sapiens
IDFCIARSLSI

SEQ ID NO: 3273 - protein, 9 aa, Homo sapiens
SLSILEQKI

SEQ ID NO: 3274 - protein, 9 aa, Homo sapiens
GQNSSTCMI

SEQ ID NO: 3275 - protein, 9 aa, Homo sapiens
LQRDEFIKI

SEQ ID NO: 3276 - protein, 9 aa, Homo sapiens
MVHESKQKV

SEQ ID NO: 3277 - protein, 9 aa, Homo sapiens
YALVAQDVF

SEQ ID NO: 3278 - protein, 9 aa, Homo sapiens
FLLLRNSTY

SEQ ID NO: 3279 - protein, 9 aa, Homo sapiens
QTFCFDHAF

SEQ ID NO: 3280 - protein, 9 aa, Homo sapiens
RASKLTLVL

SEQ ID NO: 3281 - protein, 9 aa, Homo sapiens
EIMHMIEEY

SEQ ID NO: 3282 - protein, 8 aa, Homo sapiens
IMHMIEEY

SEQ ID NO: 3283 - protein, 10 aa, Homo sapiens
YEIMHMIEEY

SEQ ID NO: 3284 - protein, 9 aa, Homo sapiens
HAFDDKASN

SEQ ID NO: 3285 - protein, 9 aa, Homo sapiens
MPPPPLSPL

SEQ ID NO: 3286 - protein, 9 aa, Homo sapiens
RVPSKPCLM

SEQ ID NO: 3287 - protein, 9 aa, Homo sapiens
RASKLTLVL

SEQ ID NO: 3288 - protein, 9 aa, Homo sapiens
VAQDVFLLL

SEQ ID NO: 3289 - protein, 8 aa, Homo sapiens
CLPESPCL

SEQ ID NO: 3290 - protein, 10 aa, Homo sapiens
PMPPPPLSPL

SEQ ID NO: 3291 - protein, 8 aa, Homo sapiens
ESPCLSPL

SEQ ID NO: 3292 - protein, 9 aa, Homo sapiens
LALAPSSAI

SEQ ID NO: 3293 - protein, 9 aa, Homo sapiens
RASKLTLVL

SEQ ID NO: 3294 - protein, 9 aa, Homo sapiens
YALVAQDVF

SEQ ID NO: 3295 - protein, 9 aa, Homo sapiens
VAQDVFLLL

SEQ ID NO: 3296 - protein, 9 aa, Homo sapiens
FCLPESPCL

SEQ ID NO: 3297 - protein, 10 aa, Homo sapiens
LALKECILAL

SEQ ID NO: 3298 - protein, 10 aa, Homo sapiens
AFDDKASNEL

SEQ ID NO: 3299 - protein, 9 aa, Homo sapiens
RVPSKPCLM

SEQ ID NO: 3300 - protein, 9 aa, Homo sapiens
YLQNQTFCF

SEQ ID NO: 3301 - protein, 9 aa, Homo sapiens
YQFTAQPLV

SEQ ID NO: 3302 - protein, 9 aa, Homo sapiens
MPPPPLSPL

SEQ ID NO: 3303 - protein, 9 aa, Homo sapiens
NYWVTVEWV

SEQ ID NO: 3304 - protein, 9 aa, Homo sapiens
FDDKASNEL

SEQ ID NO: 3305 - protein, 9 aa, Homo sapiens
KIDLETILL

SEQ ID NO: 3306 - protein, 9 aa, Homo sapiens
FRASKLTLV

SEQ ID NO: 3307 - protein, 10 aa, Homo sapiens
FRASKLTLVL

SEQ ID NO: 3308 - protein, 9 aa, Homo sapiens
FRKGMATCF

SEQ ID NO: 3309 - protein, 9 aa, Homo sapiens
TRYLQNQTF

SEQ ID NO: 3310 - protein, 9 aa, Homo sapiens
TRNPNYEIM

SEQ ID NO: 3311 - protein, 9 aa, Homo sapiens
ERAGGVHHD

SEQ ID NO: 3312 - protein, 8 aa, Homo sapiens
TRNPNYEI

SEQ ID NO: 3313 - protein, 9 aa, Homo sapiens
FRASKLTLV

SEQ ID NO: 3314 - protein, 10 aa, Homo sapiens
FRASKLTLVL

SEQ ID NO: 3315 - protein, 9 aa, Homo sapiens
FRKGMATCF

SEQ ID NO: 3316 - protein, 9 aa, Homo sapiens
RYANRVKKL

SEQ ID NO: 3317 - protein, 9 aa, Homo sapiens
TRNPNYEIM

SEQ ID NO: 3318 - protein, 9 aa, Homo sapiens
VRPYHRGHY

SEQ ID NO: 3319 - protein, 9 aa, Homo sapiens
VYGTFFEIY

SEQ ID NO: 3320 - protein, 10 aa, Homo sapiens
ETKDPTNGYY

SEQ ID NO: 3321 - protein, 12 aa, Homo sapiens
TLETKDPTNGYY

SEQ ID NO: 3322 - protein, 11 aa, Homo sapiens
LETKDPTNGYY

SEQ ID NO: 3323 - protein, 10 aa, Homo sapiens
DTAITLSLQY

SEQ ID NO: 3324 - protein, 9 aa, Homo sapiens
TKDPTNGYY

SEQ ID NO: 3325 - protein, 11 aa, Homo sapiens
TLETKDPTNGY

SEQ ID NO: 3326 - protein, 10 aa, Homo sapiens
FLTEPVSCEV

SEQ ID NO: 3327 - protein, 9 aa, Homo sapiens
GLGPGLISV

SEQ ID NO: 3328 - protein, 8 aa, Homo sapiens
FLVETFPA

SEQ ID NO: 3329 - protein, 9 aa, Homo sapiens
TLLMVITGV

SEQ ID NO: 3330 - protein, 10 aa, Homo sapiens
MLRMRVPALL

SEQ ID NO: 3331 - protein, 9 aa, Homo sapiens
VLFGPILQA

SEQ ID NO: 3332 - protein, 11 aa, Homo sapiens
FLCQATAQPPV

SEQ ID NO: 3333 - protein, 9 aa, Homo sapiens
ILQAKPEPV

SEQ ID NO: 3334 - protein, 12 aa, Homo sapiens
FLQQPEDLVVLL

SEQ ID NO: 3335 - protein, 9 aa, Homo sapiens
FLQQPEDLV

SEQ ID NO: 3336 - protein, 10 aa, Homo sapiens
TTLLMVITGV

SEQ ID NO: 3337 - protein, 8 aa, Homo sapiens
LLMVITGV

SEQ ID NO: 3338 - protein, 9 aa, Homo sapiens
TLSASPHTV

SEQ ID NO: 3339 - protein, 9 aa, Homo sapiens
VLLGEEARL

SEQ ID NO: 3340 - protein, 9 aa, Homo sapiens
VLGGPSVSL

SEQ ID NO: 3341 - protein, 10 aa, Homo sapiens
VLVPPEAPQV

SEQ ID NO: 3342 - protein, 9 aa, Homo sapiens
RLGEGGAQA

SEQ ID NO: 3343 - protein, 9 aa, Homo sapiens
ALHSAPAFL

SEQ ID NO: 3344 - protein, 10 aa, Homo sapiens
FLQQPEDLVV

SEQ ID NO: 3345 - protein, 9 aa, Homo sapiens
ATFHQTLLK

SEQ ID NO: 3346 - protein, 10 aa, Homo sapiens
VLFGPILQAK

SEQ ID NO: 3347 - protein, 10 aa, Homo sapiens
GATFHQTLLK

SEQ ID NO: 3348 - protein, 9 aa, Homo sapiens
RLYRARAGY

SEQ ID NO: 3349 - protein, 9 aa, Homo sapiens
VLFGPILQA

SEQ ID NO: 3350 - protein, 10 aa, Homo sapiens
ATAQPPVTGY

SEQ ID NO: 3351 - protein, 9 aa, Homo sapiens
ATFHQTLLK

SEQ ID NO: 3352 - protein, 10 aa, Homo sapiens
GATFHQTLLK

SEQ ID NO: 3353 - protein, 9 aa, Homo sapiens
ASASFSEQK

SEQ ID NO: 3354 - protein, 10 aa, Homo sapiens
VLFGPILQAK

SEQ ID NO: 3355 - protein, 10 aa, Homo sapiens
ATFHQTLLKE

SEQ ID NO: 3356 - protein, 9 aa, Homo sapiens
ATQAGLRSR

SEQ ID NO: 3357 - protein, 9 aa, Homo sapiens
GTQESDFSR

SEQ ID NO: 3358 - protein, 10 aa, Homo sapiens
RVPALLVLLF

SEQ ID NO: 3359 - protein, 9 aa, Homo sapiens
LWFRDGVLL

SEQ ID NO: 3360 - protein, 8 aa, Homo sapiens
SYIKPTSF

SEQ ID NO: 3361 - protein, 10 aa, Homo sapiens
RLPCALGAYW

SEQ ID NO: 3362 - protein, 9 aa, Homo sapiens
LGPPGTPTF

SEQ ID NO: 3363 - protein, 8 aa, Homo sapiens
QYPPEVTL

SEQ ID NO: 3364 - protein, 10 aa, Homo sapiens
PFSHDDGATF

SEQ ID NO: 3365 - protein, 9 aa, Homo sapiens
KVRGVSPPA

SEQ ID NO: 3366 - protein, 9 aa, Homo sapiens
RSRPAQLHV

SEQ ID NO: 3367 - protein, 9 aa, Homo sapiens
KVRGVSVSL

SEQ ID NO: 3368 - protein, 9 aa, Homo sapiens
RMRVPALLV

SEQ ID NO: 3369 - protein, 9 aa, Homo sapiens
ATFHQTLLK

SEQ ID NO: 3370 - protein, 9 aa, Homo sapiens
ETKDPTNGY

SEQ ID NO: 3371 - protein, 9 aa, Homo sapiens
MVPPCRLYR

SEQ ID NO: 3372 - protein, 10 aa, Homo sapiens
FSRSFNCSAR

SEQ ID NO: 3373 - protein, 9 aa, Homo sapiens
DASFSCAWR

SEQ ID NO: 3374 - protein, 10 aa, Homo sapiens
CFRGRAGWSR

SEQ ID NO: 3375 - protein, 9 aa, Homo sapiens
ETFPAPESR

SEQ ID NO: 3376 - protein, 11 aa, Homo sapiens
EVSNAVGSANR

SEQ ID NO: 3377 - protein, 9 aa, Homo sapiens
SFNCSARNR

SEQ ID NO: 3378 - protein, 9 aa, Homo sapiens
EDAGDYVCR

SEQ ID NO: 3379 - protein, 9 aa, Homo sapiens
APAFLRGPA

SEQ ID NO: 3380 - protein, 9 aa, Homo sapiens
HPRAFTSYI

SEQ ID NO: 3381 - protein, 10 aa, Homo sapiens
FPAPESRGGL

SEQ ID NO: 3382 - protein, 11 aa, Homo sapiens
APAFLRGPARL

SEQ ID NO: 3383 - protein, 11 aa, Homo sapiens
SPLGPPGTPTF

SEQ ID NO: 3384 - protein, 9 aa, Homo sapiens
SPDSRVTSF

SEQ ID NO: 3385 - protein, 10 aa, Homo sapiens
APQVLGGPSV

SEQ ID NO: 3386 - protein, 9 aa, Homo sapiens
VPPEAPQVL

SEQ ID NO: 3387 - protein, 9 aa, Homo sapiens
MLRMRVPAL

SEQ ID NO: 3388 - protein, 10 aa, Homo sapiens
MLRMRVPALL

SEQ ID NO: 3389 - protein, 12 aa, Homo sapiens
MLRMRVPALLVL

SEQ ID NO: 3390 - protein, 10 aa, Homo sapiens
FVCRARSQAL

SEQ ID NO: 3391 - protein, 9 aa, Homo sapiens
DLHIRPVEL

SEQ ID NO: 3392 - protein, 9 aa, Homo sapiens
YYKVRGVSV

SEQ ID NO: 3393 - protein, 9 aa, Homo sapiens
TSYIKPTSF

SEQ ID NO: 3394 - protein, 10 aa, Homo sapiens
YDFNPHLGMV

SEQ ID NO: 3395 - protein, 9 aa, Homo sapiens
RDLLPTVRI

SEQ ID NO: 3396 - protein, 10 aa, Homo sapiens
ADASFLTEPV

SEQ ID NO: 3397 - protein, 10 aa, Homo sapiens
RDLLPTVRIV

SEQ ID NO: 3398 - protein, 9 aa, Homo sapiens
CQATAQPPV

SEQ ID NO: 3399 - protein, 9 aa, Homo sapiens
GQHDLHIRP

SEQ ID NO: 3400 - protein, 10 aa, Homo sapiens
GQHDLHIRPV

SEQ ID NO: 3401 - protein, 8 aa, Homo sapiens
GLISVLHI

SEQ ID NO: 3402 - protein, 9 aa, Homo sapiens
LQYPPEVTL

SEQ ID NO: 3403 - protein, 9 aa, Homo sapiens
FSHDDGATF

SEQ ID NO: 3404 - protein, 9 aa, Homo sapiens
FASPAPDAV

SEQ ID NO: 3405 - protein, 10 aa, Homo sapiens
FTSYIKPTSF

SEQ ID NO: 3406 - protein, 9 aa, Homo sapiens
AAATTTLLM

SEQ ID NO: 3407 - protein, 9 aa, Homo sapiens
TSYIKPTSF

SEQ ID NO: 3408 - protein, 9 aa, Homo sapiens
TAQPPVTGY

SEQ ID NO: 3409 - protein, 9 aa, Homo sapiens
YAAFPTPSH

SEQ ID NO: 3410 - protein, 9 aa, Homo sapiens
VAAATTTLL

SEQ ID NO: 3411 - protein, 8 aa, Homo sapiens
FLPPPSPL

SEQ ID NO: 3412 - protein, 9 aa, Homo sapiens
RVPALLVLL

SEQ ID NO: 3413 - protein, 9 aa, Homo sapiens
NAPPVVTAL

SEQ ID NO: 3414 - protein, 9 aa, Homo sapiens
EAPGGGLFL

SEQ ID NO: 3415 - protein, 9 aa, Homo sapiens
RGPARLQCL

SEQ ID NO: 3416 - protein, 9 aa, Homo sapiens
VAAATTTLL

SEQ ID NO: 3417 - protein, 9 aa, Homo sapiens
FASPAPDAV

SEQ ID NO: 3418 - protein, 9 aa, Homo sapiens
FSHDDGATF

SEQ ID NO: 3419 - protein, 9 aa, Homo sapiens
AAATTTLLM

SEQ ID NO: 3420 - protein, 9 aa, Homo sapiens
NAPPVVTAL

SEQ ID NO: 3421 - protein, 9 aa, Homo sapiens
LQYPPEVTL

SEQ ID NO: 3422 - protein, 9 aa, Homo sapiens
YAAFPTPSH

SEQ ID NO: 3423 - protein, 10 aa, Homo sapiens
FYDFNPHLGM

SEQ ID NO: 3424 - protein, 9 aa, Homo sapiens
SHDDGATFV

SEQ ID NO: 3425 - protein, 8 aa, Homo sapiens
FYDFNPHL

SEQ ID NO: 3426 - protein, 9 aa, Homo sapiens
FYDFNPHLG

SEQ ID NO: 3427 - protein, 8 aa, Homo sapiens
QYPPEVTL

SEQ ID NO: 3428 - protein, 9 aa, Homo sapiens
LRMRVPALL

SEQ ID NO: 3429 - protein, 9 aa, Homo sapiens
MRVPALLVL

SEQ ID NO: 3430 - protein, 10 aa, Homo sapiens
MLRMRVPALL

SEQ ID NO: 3431 - protein, 9 aa, Homo sapiens
TRRGGAQVL

SEQ ID NO: 3432 - protein, 8 aa, Homo sapiens
RRGGAQVL

SEQ ID NO: 3433 - protein, 9 aa, Homo sapiens
DRGPIVHTD

SEQ ID NO: 3434 - protein, 9 aa, Homo sapiens
SRPAQLHVL

SEQ ID NO: 3435 - protein, 9 aa, Homo sapiens
LRMRVPALL

SEQ ID NO: 3436 - protein, 9 aa, Homo sapiens
MRVPALLVL

SEQ ID NO: 3437 - protein, 9 aa, Homo sapiens
SRPAQLHVL

SEQ ID NO: 3438 - protein, 9 aa, Homo sapiens
LYRARAGYL

SEQ ID NO: 3439 - protein, 8 aa, Homo sapiens
QYPPEVTL

SEQ ID NO: 3440 - protein, 9 aa, Homo sapiens
NAPPVVTAL

SEQ ID NO: 3441 - protein, 10 aa, Homo sapiens
LSNDMCARAY

SEQ ID NO: 3442 - protein, 10 aa, Homo sapiens
HSQPWQVAVY

SEQ ID NO: 3443 - protein, 9 aa, Homo sapiens
YSEKVTEFM

SEQ ID NO: 3444 - protein, 9 aa, Homo sapiens
STCLLGTCY

SEQ ID NO: 3445 - protein, 10 aa, Homo sapiens
LSTCLLGTCY

SEQ ID NO: 3446 - protein, 9 aa, Homo sapiens
DTCGVSHPY

SEQ ID NO: 3447 - protein, 11 aa, Homo sapiens
LLSNDMCARAY

SEQ ID NO: 3448 - protein, 12 aa, Homo sapiens
HLLSNDMCARAY

SEQ ID NO: 3449 - protein, 9 aa, Homo sapiens
SNDMCARAY

SEQ ID NO: 3450 - protein, 9 aa, Homo sapiens
ITDVVKVLG

SEQ ID NO: 3451 - protein, 8 aa, Homo sapiens
YSEKVTEF

SEQ ID NO: 3452 - protein, 10 aa, Homo sapiens
ITDVVKVLGL

SEQ ID NO: 3453 - protein, 11 aa, Homo sapiens
YSEKVTEFMLC

SEQ ID NO: 3454 - protein, 10 aa, Homo sapiens
YSEKVTEFML

SEQ ID NO: 3455 - protein, 8 aa, Homo sapiens
ITDVVKVL

SEQ ID NO: 3456 - protein, 9 aa, Homo sapiens
SLQCVSLHL

SEQ ID NO: 3457 - protein, 9 aa, Homo sapiens
LVLSIALSV

SEQ ID NO: 3458 - protein, 9 aa, Homo sapiens
VILGVHLSV

SEQ ID NO: 3459 - protein, 9 aa, Homo sapiens
VLAPQESSV

SEQ ID NO: 3460 - protein, 10 aa, Homo sapiens
FMLCAGLWTG

SEQ ID NO: 3461 - protein, 10 aa, Homo sapiens
ILGVHLSVMV

SEQ ID NO: 3462 - protein, 10 aa, Homo sapiens
SLLCTPRWCI

SEQ ID NO: 3463 - protein, 9 aa, Homo sapiens
FMLCAGLWT

SEQ ID NO: 3464 - protein, 10 aa, Homo sapiens
SLQCVSLHLL

SEQ ID NO: 3465 - protein, 12 aa, Homo sapiens
VLSTCLLGTCYV

SEQ ID NO: 3466 - protein, 10 aa, Homo sapiens
HLSVMVCFKV

SEQ ID NO: 3467 - protein, 10 aa, Homo sapiens
LLGTCYVTSI

SEQ ID NO: 3468 - protein, 12 aa, Homo sapiens
GLWTGGKDTCGV

SEQ ID NO: 3469 - protein, 8 aa, Homo sapiens
MWDLVLSI

SEQ ID NO: 3470 - protein, 10 aa, Homo sapiens
FLRPRSLQCV

SEQ ID NO: 3471 - protein, 10 aa, Homo sapiens
RVILGVHLSV

SEQ ID NO: 3472 - protein, 9 aa, Homo sapiens
ALSVGCTGI

SEQ ID NO: 3473 - protein, 10 aa, Homo sapiens
RSLQCVSLHL

SEQ ID NO: 3474 - protein, 10 aa, Homo sapiens
ALSVGCTGAV

SEQ ID NO: 3475 - protein, 8 aa, Homo sapiens
CLLGTCYV

SEQ ID NO: 3476 - protein, 9 aa, Homo sapiens
VLSTCLLGT

SEQ ID NO: 3477 - protein, 10 aa, Homo sapiens
LLSNDMCARA

SEQ ID NO: 3478 - protein, 12 aa, Homo sapiens
WLRVILGVHLSV

SEQ ID NO: 3479 - protein, 9 aa, Homo sapiens
KVTEFMLCA

SEQ ID NO: 3480 - protein, 9 aa, Homo sapiens
CLLGTCYVT

SEQ ID NO: 3481 - protein, 9 aa, Homo sapiens
SVCEPPSPV

SEQ ID NO: 3482 - protein, 9 aa, Homo sapiens
MLCAGLWTG

SEQ ID NO: 3483 - protein, 10 aa, Homo sapiens
DLVLSIALSV

SEQ ID NO: 3484 - protein, 12 aa, Homo sapiens
LLGTCYVTSIAV

SEQ ID NO: 3485 - protein, 9 aa, Homo sapiens
GLPTQEPAL

SEQ ID NO: 3486 - protein, 8 aa, Homo sapiens
ALPEKPAV

SEQ ID NO: 3487 - protein, 11 aa, Homo sapiens
RLSEPAKITDV

SEQ ID NO: 3488 - protein, 9 aa, Homo sapiens
AKITDVVKV

SEQ ID NO: 3489 - protein, 10 aa, Homo sapiens
ALPEKPAVYT

SEQ ID NO: 3490 - protein, 8 aa, Homo sapiens
KITDVVKV

SEQ ID NO: 3491 - protein, 9 aa, Homo sapiens
KITDVVKVL

SEQ ID NO: 3492 - protein, 9 aa, Homo sapiens
ALPEKPAVY

SEQ ID NO: 3493 - protein, 9 aa, Homo sapiens
AWLRVILGV

SEQ ID NO: 3494 - protein, 9 aa, Homo sapiens
STGDHLLRL

SEQ ID NO: 3495 - protein, 9 aa, Homo sapiens
HLLSNDMCA

SEQ ID NO: 3496 - protein, 8 aa, Homo sapiens
SLLKHQSL

SEQ ID NO: 3497 - protein, 9 aa, Homo sapiens
ALSVGCTGA

SEQ ID NO: 3498 - protein, 8 aa, Homo sapiens
RLSEPAKI

SEQ ID NO: 3499 - protein, 8 aa, Homo sapiens
ALSHVPCL

SEQ ID NO: 3500 - protein, 9 aa, Homo sapiens
FLRPRSLQC

SEQ ID NO: 3501 - protein, 9 aa, Homo sapiens
NLFEPEDTG

SEQ ID NO: 3502 - protein, 10 aa, Homo sapiens
HPLYNMSLLK

SEQ ID NO: 3503 - protein, 9 aa, Homo sapiens
ALSHVPCLK

SEQ ID NO: 3504 - protein, 9 aa, Homo sapiens
PLYNMSLLK

SEQ ID NO: 3505 - protein, 12 aa, Homo sapiens
FPHPLYNMSLLK

SEQ ID NO: 3506 - protein, 9 aa, Homo sapiens
HLSVMVCFK

SEQ ID NO: 3507 - protein, 11 aa, Homo sapiens
PHPLYNMSLLK

SEQ ID NO: 3508 - protein, 10 aa, Homo sapiens
VHLSVMVCFK

SEQ ID NO: 3509 - protein, 10 aa, Homo sapiens
MLLRLSEPAK

SEQ ID NO: 3510 - protein, 10 aa, Homo sapiens
GALSHVPCLK

SEQ ID NO: 3511 - protein, 9 aa, Homo sapiens
AVYTKVVHY

SEQ ID NO: 3512 - protein, 9 aa, Homo sapiens
AVYSHGWAH

SEQ ID NO: 3513 - protein, 10 aa, Homo sapiens
AVYTKVVHYR

SEQ ID NO: 3514 - protein, 9 aa, Homo sapiens
ALPEKPAVY

SEQ ID NO: 3515 - protein, 11 aa, Homo sapiens
AVYTKVVHYRK

SEQ ID NO: 3516 - protein, 9 aa, Homo sapiens
AVDGAGQKK

SEQ ID NO: 3517 - protein, 10 aa, Homo sapiens
HPLYNMSLLK

SEQ ID NO: 3518 - protein, 10 aa, Homo sapiens
AVYTKVVHYR

SEQ ID NO: 3519 - protein, 9 aa, Homo sapiens
ALSHVPCLK

SEQ ID NO: 3520 - protein, 9 aa, Homo sapiens
HLSVMVCFK

SEQ ID NO: 3521 - protein, 10 aa, Homo sapiens
GALSHVPCLK

SEQ ID NO: 3522 - protein, 9 aa, Homo sapiens
PLYNMSLLK

SEQ ID NO: 3523 - protein, 9 aa, Homo sapiens
AVYTKVVHY

SEQ ID NO: 3524 - protein, 10 aa, Homo sapiens
VHLSVMVCFK

SEQ ID NO: 3525 - protein, 10 aa, Homo sapiens
VTSIAVDPGK

SEQ ID NO: 3526 - protein, 11 aa, Homo sapiens
AVYTKVVHYRK

SEQ ID NO: 3527 - protein, 9 aa, Homo sapiens
AVDGAGQKK

SEQ ID NO: 3528 - protein, 9 aa, Homo sapiens
ASTGDHLLR

SEQ ID NO: 3529 - protein, 9 aa, Homo sapiens
SVGCTGIAR

SEQ ID NO: 3530 - protein, 10 aa, Homo sapiens
GSIEPEEFLR

SEQ ID NO: 3531 - protein, 9 aa, Homo sapiens
AVYSHGWAH

SEQ ID NO: 3532 - protein, 9 aa, Homo sapiens
SIEPEEFLR

SEQ ID NO: 3533 - protein, 9 aa, Homo sapiens
VWLGRHNLF

SEQ ID NO: 3534 - protein, 9 aa, Homo sapiens
AYSEKVTEF

SEQ ID NO: 3535 - protein, 10 aa, Homo sapiens
RAYSEKVTEF

SEQ ID NO: 3536 - protein, 10 aa, Homo sapiens
QVWLGRHNLF

SEQ ID NO: 3537 - protein, 9 aa, Homo sapiens
SFPHPLYNM

SEQ ID NO: 3538 - protein, 9 aa, Homo sapiens
EFMLCAGLW

SEQ ID NO: 3539 - protein, 10 aa, Homo sapiens
TEFMLCAGLW

SEQ ID NO: 3540 - protein, 12 aa, Homo sapiens
VYTKVVHYRKWI

SEQ ID NO: 3541 - protein, 11 aa, Homo sapiens
VYTKVVHYRKW

SEQ ID NO: 3542 - protein, 9 aa, Homo sapiens
VYTKVVHYR

SEQ ID NO: 3543 - protein, 9 aa, Homo sapiens
VYSHGWAHC

SEQ ID NO: 3544 - protein, 9 aa, Homo sapiens
QRVPVSHSF

SEQ ID NO: 3545 - protein, 9 aa, Homo sapiens
SWGPEPCAL

SEQ ID NO: 3546 - protein, 9 aa, Homo sapiens
VHLSVMVCF

SEQ ID NO: 3547 - protein, 9 aa, Homo sapiens
RTRGVLAPQ

SEQ ID NO: 3548 - protein, 9 aa, Homo sapiens
KTQARGSLS

SEQ ID NO: 3549 - protein, 10 aa, Homo sapiens
KTQARGSLSA

SEQ ID NO: 3550 - protein, 10 aa, Homo sapiens
RTRGVLAPQE

SEQ ID NO: 3551 - protein, 12 aa, Homo sapiens
RTRGVLAPQESS

SEQ ID NO: 3552 - protein, 11 aa, Homo sapiens
RTRGVLAPQES

SEQ ID NO: 3553 - protein, 8 aa, Homo sapiens
RTRGVLAP

SEQ ID NO: 3554 - protein, 9 aa, Homo sapiens
LLRLSEPAK

SEQ ID NO: 3555 - protein, 9 aa, Homo sapiens
GSRTPSQPT

SEQ ID NO: 3556 - protein, 9 aa, Homo sapiens
AVYTKVVHY

SEQ ID NO: 3557 - protein, 9 aa, Homo sapiens
KITDVVKVL

SEQ ID NO: 3558 - protein, 9 aa, Homo sapiens
AVDGAGQKK

SEQ ID NO: 3559 - protein, 9 aa, Homo sapiens
LVLSIALSV

SEQ ID NO: 3560 - protein, 9 aa, Homo sapiens
SVCEPPSPV

SEQ ID NO: 3561 - protein, 10 aa, Homo sapiens
RVILGVHLSV

SEQ ID NO: 3562 - protein, 9 aa, Homo sapiens
VILGVHLSV

SEQ ID NO: 3563 - protein, 9 aa, Homo sapiens
TSIAVDPGK

SEQ ID NO: 3564 - protein, 9 aa, Homo sapiens
VYTKVVHYR

SEQ ID NO: 3565 - protein, 10 aa, Homo sapiens
MSLLKHQSLR

SEQ ID NO: 3566 - protein, 10 aa, Homo sapiens
AVYTKVVHYR

SEQ ID NO: 3567 - protein, 10 aa, Homo sapiens
CLKSLLCTPR

SEQ ID NO: 3568 - protein, 9 aa, Homo sapiens
SLLKHQSLR

SEQ ID NO: 3569 - protein, 9 aa, Homo sapiens
LSATASHTR

SEQ ID NO: 3570 - protein, 11 aa, Homo sapiens
NMSLLKHQSLR

SEQ ID NO: 3571 - protein, 9 aa, Homo sapiens
SVGCTGIAR

SEQ ID NO: 3572 - protein, 12 aa, Homo sapiens
YNMSLLKHQSLR

SEQ ID NO: 3573 - protein, 9 aa, Homo sapiens
EPEEFLRPR

SEQ ID NO: 3574 - protein, 9 aa, Homo sapiens
GAVPLIQSR

SEQ ID NO: 3575 - protein, 10 aa, Homo sapiens
STGDHLLRLR

SEQ ID NO: 3576 - protein, 9 aa, Homo sapiens
SIEPEEFLR

SEQ ID NO: 3577 - protein, 9 aa, Homo sapiens
TGDHLLRLR

SEQ ID NO: 3578 - protein, 10 aa, Homo sapiens
RPRSLQCVSL

SEQ ID NO: 3579 - protein, 12 aa, Homo sapiens
RPRSLQCVSLHL

SEQ ID NO: 3580 - protein, 10 aa, Homo sapiens
FPHPLYNMSL

SEQ ID NO: 3581 - protein, 9 aa, Homo sapiens
KPAVYTKVV

SEQ ID NO: 3582 - protein, 10 aa, Homo sapiens
SPIPVLSTCL

SEQ ID NO: 3583 - protein, 9 aa, Homo sapiens
HPLYNMSLL

SEQ ID NO: 3584 - protein, 12 aa, Homo sapiens
HPQWVLTAAHCL

SEQ ID NO: 3585 - protein, 11 aa, Homo sapiens
LRPRSLQCVSL

SEQ ID NO: 3586 - protein, 9 aa, Homo sapiens
RPRSLQCVS

SEQ ID NO: 3587 - protein, 9 aa, Homo sapiens
SPIPVLSTC

SEQ ID NO: 3588 - protein, 9 aa, Homo sapiens
IPVLSTCLL

SEQ ID NO: 3589 - protein, 11 aa, Homo sapiens
SPIPVLSTCLL

SEQ ID NO: 3590 - protein, 9 aa, Homo sapiens
GPAHPGAST

SEQ ID NO: 3591 - protein, 9 aa, Homo sapiens
TPSQPTPEC

SEQ ID NO: 3592 - protein, 12 aa, Homo sapiens
FLRPRSLQCVSL

SEQ ID NO: 3593 - protein, 9 aa, Homo sapiens
MSLLKHQSL

SEQ ID NO: 3594 - protein, 10 aa, Homo sapiens
NMSLLKHQSL

SEQ ID NO: 3595 - protein, 10 aa, Homo sapiens
FLRPRSLQCV

SEQ ID NO: 3596 - protein, 9 aa, Homo sapiens
FLRPRSLQC

SEQ ID NO: 3597 - protein, 8 aa, Homo sapiens
SLLKHQSL

SEQ ID NO: 3598 - protein, 10 aa, Homo sapiens
FPHPLYNMSL

SEQ ID NO: 3599 - protein, 9 aa, Homo sapiens
ILGVHLSVM

SEQ ID NO: 3600 - protein, 11 aa, Homo sapiens
YNMSLLKHQSL

SEQ ID NO: 3601 - protein, 10 aa, Homo sapiens
CFKVSHHGAL

SEQ ID NO: 3602 - protein, 9 aa, Homo sapiens
EEFLRPRSL

SEQ ID NO: 3603 - protein, 8 aa, Homo sapiens
DLVLSIAL

SEQ ID NO: 3604 - protein, 8 aa, Homo sapiens
HPLYNMSL

SEQ ID NO: 3605 - protein, 8 aa, Homo sapiens
VPCLKSLL

SEQ ID NO: 3606 - protein, 8 aa, Homo sapiens
EPAKITDV

SEQ ID NO: 3607 - protein, 8 aa, Homo sapiens
DVVKVLGL

SEQ ID NO: 3608 - protein, 8 aa, Homo sapiens
HVPCLKSL

SEQ ID NO: 3609 - protein, 10 aa, Homo sapiens
RAWLRVILGV

SEQ ID NO: 3610 - protein, 9 aa, Homo sapiens
TEFMLCAGL

SEQ ID NO: 3611 - protein, 10 aa, Homo sapiens
MWDLVLSIAL

SEQ ID NO: 3612 - protein, 10 aa, Homo sapiens
TEFMLCAGLW

SEQ ID NO: 3613 - protein, 9 aa, Homo sapiens
WDLVLSIAL

SEQ ID NO: 3614 - protein, 9 aa, Homo sapiens
KDRAWLRVI

SEQ ID NO: 3615 - protein, 9 aa, Homo sapiens
WAHCGGVLV

SEQ ID NO: 3616 - protein, 11 aa, Homo sapiens
WDLVLSIALSV

SEQ ID NO: 3617 - protein, 9 aa, Homo sapiens
LSVMVCFKV

SEQ ID NO: 3618 - protein, 9 aa, Homo sapiens
AWLRVILGV

SEQ ID NO: 3619 - protein, 9 aa, Homo sapiens
ALSVGCTGI

SEQ ID NO: 3620 - protein, 8 aa, Homo sapiens
KITDVVKV

SEQ ID NO: 3621 - protein, 8 aa, Homo sapiens
RLSEPAKI

SEQ ID NO: 3622 - protein, 8 aa, Homo sapiens
GQHRTRGV

SEQ ID NO: 3623 - protein, 9 aa, Homo sapiens
AKITDVVKV

SEQ ID NO: 3624 - protein, 9 aa, Homo sapiens
VILGVHLSV

SEQ ID NO: 3625 - protein, 9 aa, Homo sapiens
HSQPWQVAV

SEQ ID NO: 3626 - protein, 9 aa, Homo sapiens
RAYSEKVTE

SEQ ID NO: 3627 - protein, 10 aa, Homo sapiens
HSFPHPLYNM

SEQ ID NO: 3628 - protein, 10 aa, Homo sapiens
HSQPWQVAVY

SEQ ID NO: 3629 - protein, 10 aa, Homo sapiens
LSNDMCARAY

SEQ ID NO: 3630 - protein, 9 aa, Homo sapiens
LSVGCTGAV

SEQ ID NO: 3631 - protein, 9 aa, Homo sapiens
SQPWQVAVY

SEQ ID NO: 3632 - protein, 10 aa, Homo sapiens
RAYSEKVTEF

SEQ ID NO: 3633 - protein, 9 aa, Homo sapiens
WAHCGGVLV

SEQ ID NO: 3634 - protein, 9 aa, Homo sapiens
YSEKVTEFM

SEQ ID NO: 3635 - protein, 10 aa, Homo sapiens
LSTCLLGTCY

SEQ ID NO: 3636 - protein, 9 aa, Homo sapiens
AVYTKVVHY

SEQ ID NO: 3637 - protein, 9 aa, Homo sapiens
AVYSHGWAH

SEQ ID NO: 3638 - protein, 9 aa, Homo sapiens
VSHPYSQHL

SEQ ID NO: 3639 - protein, 9 aa, Homo sapiens
VSHHGALSH

SEQ ID NO: 3640 - protein, 9 aa, Homo sapiens
ALPEKPAVY

SEQ ID NO: 3641 - protein, 8 aa, Homo sapiens
VSHPYSQH

SEQ ID NO: 3642 - protein, 9 aa, Homo sapiens
IARSGWVGT

SEQ ID NO: 3643 - protein, 9 aa, Homo sapiens
HSQPWQVAV

SEQ ID NO: 3644 - protein, 9 aa, Homo sapiens
MSLLKHQSL

SEQ ID NO: 3645 - protein, 9 aa, Homo sapiens
VSHPYSQHL

SEQ ID NO: 3646 - protein, 10 aa, Homo sapiens
FPHPLYNMSL

SEQ ID NO: 3647 - protein, 9 aa, Homo sapiens
HVPCLKSLL

SEQ ID NO: 3648 - protein, 9 aa, Homo sapiens
HSQPWQVAV

SEQ ID NO: 3649 - protein, 9 aa, Homo sapiens
WVGTTCLSL

SEQ ID NO: 3650 - protein, 9 aa, Homo sapiens
YSEKVTEFM

SEQ ID NO: 3651 - protein, 9 aa, Homo sapiens
STGDHLLRL

SEQ ID NO: 3652 - protein, 9 aa, Homo sapiens
ILGVHLSVM

SEQ ID NO: 3653 - protein, 8 aa, Homo sapiens
WGPEPCAL

SEQ ID NO: 3654 - protein, 9 aa, Homo sapiens
GLPTQEPAL

SEQ ID NO: 3655 - protein, 8 aa, Homo sapiens
HVPCLKSL

SEQ ID NO: 3656 - protein, 8 aa, Homo sapiens
ALPEKPAV

SEQ ID NO: 3657 - protein, 8 aa, Homo sapiens
LAPQESSV

SEQ ID NO: 3658 - protein, 9 aa, Homo sapiens
NSPIPVLST

SEQ ID NO: 3659 - protein, 9 aa, Homo sapiens
ALPEKPAVY

SEQ ID NO: 3660 - protein, 9 aa, Homo sapiens
PIPVLSTCL

SEQ ID NO: 3661 - protein, 9 aa, Homo sapiens
MSLLKHQSL

SEQ ID NO: 3662 - protein, 9 aa, Homo sapiens
LSVGCTGAV

SEQ ID NO: 3663 - protein, 9 aa, Homo sapiens
WAHCGGVLV

SEQ ID NO: 3664 - protein, 9 aa, Homo sapiens
VSHPYSQHL

SEQ ID NO: 3665 - protein, 9 aa, Homo sapiens
HSQPWQVAV

SEQ ID NO: 3666 - protein, 9 aa, Homo sapiens
TASHTRSTI

SEQ ID NO: 3667 - protein, 10 aa, Homo sapiens
HSFPHPLYNM

SEQ ID NO: 3668 - protein, 9 aa, Homo sapiens
FKVSHHGAL

SEQ ID NO: 3669 - protein, 9 aa, Homo sapiens
GALSHVPCL

SEQ ID NO: 3670 - protein, 9 aa, Homo sapiens
IAVDPGKQQ

SEQ ID NO: 3671 - protein, 9 aa, Homo sapiens
KITDVVKVL

SEQ ID NO: 3672 - protein, 8 aa, Homo sapiens
WAHCGGVL

SEQ ID NO: 3673 - protein, 10 aa, Homo sapiens
LSHVPCLKSL

SEQ ID NO: 3674 - protein, 9 aa, Homo sapiens
STGDHLLRL

SEQ ID NO: 3675 - protein, 9 aa, Homo sapiens
SFPHPLYNM

SEQ ID NO: 3676 - protein, 9 aa, Homo sapiens
YSEKVTEFM

SEQ ID NO: 3677 - protein, 10 aa, Homo sapiens
MWDLVLSIAL

SEQ ID NO: 3678 - protein, 9 aa, Homo sapiens
AYSEKVTEF

SEQ ID NO: 3679 - protein, 9 aa, Homo sapiens
GHNSPIPVL

SEQ ID NO: 3680 - protein, 10 aa, Homo sapiens
FPHPLYNMSL

SEQ ID NO: 3681 - protein, 9 aa, Homo sapiens
SLQCVSLHL

SEQ ID NO: 3682 - protein, 9 aa, Homo sapiens
HSQPWQVAV

SEQ ID NO: 3683 - protein, 10 aa, Homo sapiens
HSFPHPLYNM

SEQ ID NO: 3684 - protein, 8 aa, Homo sapiens
MWDLVLSI

SEQ ID NO: 3685 - protein, 8 aa, Homo sapiens
ITDVVKVL

SEQ ID NO: 3686 - protein, 9 aa, Homo sapiens
MWDLVLSIA

SEQ ID NO: 3687 - protein, 9 aa, Homo sapiens
ITDVVKVLG

SEQ ID NO: 3688 - protein, 8 aa, Homo sapiens
TGDHLLRL

SEQ ID NO: 3689 - protein, 9 aa, Homo sapiens
SWGPEPCAL

SEQ ID NO: 3690 - protein, 10 aa, Homo sapiens
HSFPHPLYNM

SEQ ID NO: 3691 - protein, 9 aa, Homo sapiens
DRAWLRVIL

SEQ ID NO: 3692 - protein, 9 aa, Homo sapiens
QRVPVSHSF

SEQ ID NO: 3693 - protein, 9 aa, Homo sapiens
LRLSEPAKI

SEQ ID NO: 3694 - protein, 12 aa, Homo sapiens
HSFPHPLYNMSL

SEQ ID NO: 3695 - protein, 9 aa, Homo sapiens
HSQPWQVAV

SEQ ID NO: 3696 - protein, 9 aa, Homo sapiens
VSHPYSQHL

SEQ ID NO: 3697 - protein, 10 aa, Homo sapiens
KDRAWLRVIL

SEQ ID NO: 3698 - protein, 9 aa, Homo sapiens
SHVPCLKSL

SEQ ID NO: 3699 - protein, 8 aa, Homo sapiens
HNSPIPVL

SEQ ID NO: 3700 - protein, 10 aa, Homo sapiens
HSQPWQVAVY

SEQ ID NO: 3701 - protein, 9 aa, Homo sapiens
HSFPHPLYN

SEQ ID NO: 3702 - protein, 9 aa, Homo sapiens
SWGPEPCAL

SEQ ID NO: 3703 - protein, 9 aa, Homo sapiens
RSGWVGTTC

SEQ ID NO: 3704 - protein, 9 aa, Homo sapiens
KITDVVKVL

SEQ ID NO: 3705 - protein, 9 aa, Homo sapiens
ARSGWVGTT

SEQ ID NO: 3706 - protein, 9 aa, Homo sapiens
AYSEKVTEF

SEQ ID NO: 3707 - protein, 10 aa, Homo sapiens
HSFPHPLYNM

SEQ ID NO: 3708 - protein, 9 aa, Homo sapiens
SFPHPLYNM

SEQ ID NO: 3709 - protein, 9 aa, Homo sapiens
QRVPVSHSF

SEQ ID NO: 3710 - protein, 9 aa, Homo sapiens
SHVPCLKSL

SEQ ID NO: 3711 - protein, 9 aa, Homo sapiens
VWLGRHNLF

SEQ ID NO: 3712 - protein, 10 aa, Homo sapiens
FPHPLYNMSL

SEQ ID NO: 3713 - protein, 9 aa, Homo sapiens
LRPRSLQCV

SEQ ID NO: 3714 - protein, 9 aa, Homo sapiens
VSHPYSQHL

SEQ ID NO: 3715 - protein, 9 aa, Homo sapiens
FKVSHHGAL

SEQ ID NO: 3716 - protein, 8 aa, Homo sapiens
VYTKVVHY

SEQ ID NO: 3717 - protein, 9 aa, Homo sapiens
ALPEKPAVY

SEQ ID NO: 3718 - protein, 9 aa, Homo sapiens
LRVILGVHL

SEQ ID NO: 3719 - protein, 9 aa, Homo sapiens
LRPDEDSSH

SEQ ID NO: 3720 - protein, 9 aa, Homo sapiens
KITDVVKVL

SEQ ID NO: 3721 - protein, 8 aa, Homo sapiens
HNSPIPVL

SEQ ID NO: 3722 - protein, 9 aa, Homo sapiens
STCSVSHPY

SEQ ID NO: 3723 - protein, 10 aa, Homo sapiens
VSHSFPHPLY

SEQ ID NO: 3724 - protein, 10 aa, Homo sapiens
KSTCSVSHPY

SEQ ID NO: 3725 - protein, 12 aa, Homo sapiens
IAQPAPCSQLLY

SEQ ID NO: 3726 - protein, 10 aa, Homo sapiens
LTDAVKVMDL

SEQ ID NO: 3727 - protein, 10 aa, Homo sapiens
CALPERPSLY

SEQ ID NO: 3728 - protein, 10 aa, Homo sapiens
CSGDSGGPLV

SEQ ID NO: 3729 - protein, 10 aa, Homo sapiens
SSHDLMLLRL

SEQ ID NO: 3730 - protein, 10 aa, Homo sapiens
QPAPCSQLLY

SEQ ID NO: 3731 - protein, 8 aa, Homo sapiens
LSEPAELT

SEQ ID NO: 3732 - protein, 9 aa, Homo sapiens
ALPERPSLY

SEQ ID NO: 3733 - protein, 8 aa, Homo sapiens
LPERPSLY

SEQ ID NO: 3734 - protein, 9 aa, Homo sapiens
LSEPAELTD

SEQ ID NO: 3735 - protein, 9 aa, Homo sapiens
LTDAVKVMD

SEQ ID NO: 3736 - protein, 8 aa, Homo sapiens
HSFPHPLY

SEQ ID NO: 3737 - protein, 8 aa, Homo sapiens
LTDAVKVM

SEQ ID NO: 3738 - protein, 9 aa, Homo sapiens
LTMPALPMV

SEQ ID NO: 3739 - protein, 10 aa, Homo sapiens
FLTLSVTWIA

SEQ ID NO: 3740 - protein, 9 aa, Homo sapiens
KLQCVDLHV

SEQ ID NO: 3741 - protein, 10 aa, Homo sapiens
ILITELTMPA

SEQ ID NO: 3742 - protein, 9 aa, Homo sapiens
FLTLSVTWI

SEQ ID NO: 3743 - protein, 10 aa, Homo sapiens
FLTLAVCGGV

SEQ ID NO: 3744 - protein, 9 aa, Homo sapiens
MLLRLSEPA

SEQ ID NO: 3745 - protein, 10 aa, Homo sapiens
ELTMPALPMV

SEQ ID NO: 3746 - protein, 10 aa, Homo sapiens
FLSLPAPLQA

SEQ ID NO: 3747 - protein, 10 aa, Homo sapiens
WIAPPLQVLV

SEQ ID NO: 3748 - protein, 10 aa, Homo sapiens
KKLQCVDLHV

SEQ ID NO: 3749 - protein, 10 aa, Homo sapiens
FLTPKKLQCV

SEQ ID NO: 3750 - protein, 9 aa, Homo sapiens
LITELTMPA

SEQ ID NO: 3751 - protein, 8 aa, Homo sapiens
FLSLPAPL

SEQ ID NO: 3752 - protein, 10 aa, Homo sapiens
LMLLRLSEPA

SEQ ID NO: 3753 - protein, 9 aa, Homo sapiens
HLPQNFLPI

SEQ ID NO: 3754 - protein, 10 aa, Homo sapiens
KLQCVDLHVI

SEQ ID NO: 3755 - protein, 9 aa, Homo sapiens
SLVPWRGGV

SEQ ID NO: 3756 - protein, 10 aa, Homo sapiens
LITELTMPAL

SEQ ID NO: 3757 - protein, 9 aa, Homo sapiens
VLVHPQWVL

SEQ ID NO: 3758 - protein, 9 aa, Homo sapiens
LTLAVCGGV

SEQ ID NO: 3759 - protein, 12 aa, Homo sapiens
FLTLAVCGGVLV

SEQ ID NO: 3760 - protein, 8 aa, Homo sapiens
FLPIAQPA

SEQ ID NO: 3761 - protein, 11 aa, Homo sapiens
VFLTLSVTWIA

SEQ ID NO: 3762 - protein, 10 aa, Homo sapiens
LLRLSEPAEL

SEQ ID NO: 3763 - protein, 10 aa, Homo sapiens
TLAVCGGVLV

SEQ ID NO: 3764 - protein, 10 aa, Homo sapiens
VISNDVCAQV

SEQ ID NO: 3765 - protein, 9 aa, Homo sapiens
FMLCAGRWT

SEQ ID NO: 3766 - protein, 11 aa, Homo sapiens
ILITELTMPAL

SEQ ID NO: 3767 - protein, 9 aa, Homo sapiens
LRPGDDSTL

SEQ ID NO: 3768 - protein, 8 aa, Homo sapiens
RLSEPAEL

SEQ ID NO: 3769 - protein, 10 aa, Homo sapiens
VLTPKKLQCV

SEQ ID NO: 3770 - protein, 9 aa, Homo sapiens
SLYTKVVHY

SEQ ID NO: 3771 - protein, 8 aa, Homo sapiens
ALPERPSL

SEQ ID NO: 3772 - protein, 8 aa, Homo sapiens
ILLGRHSL

SEQ ID NO: 3773 - protein, 9 aa, Homo sapiens
FLTPKKLQC

SEQ ID NO: 3774 - protein, 9 aa, Homo sapiens
SGDSGGPLV

SEQ ID NO: 3775 - protein, 11 aa, Homo sapiens
SLFHPEDTGQV

SEQ ID NO: 3776 - protein, 9 aa, Homo sapiens
RLSEPAELT

SEQ ID NO: 3777 - protein, 9 aa, Homo sapiens
VLHGSLVPW

SEQ ID NO: 3778 - protein, 9 aa, Homo sapiens
GVLVHPQWV

SEQ ID NO: 3779 - protein, 9 aa, Homo sapiens
WIAPPLQVL

SEQ ID NO: 3780 - protein, 9 aa, Homo sapiens
TLSVTWIGA

SEQ ID NO: 3781 - protein, 8 aa, Homo sapiens
ELTDAVKV

SEQ ID NO: 3782 - protein, 9 aa, Homo sapiens
FLRPGDDST

SEQ ID NO: 3783 - protein, 9 aa, Homo sapiens
FHPEDTGQV

SEQ ID NO: 3784 - protein, 9 aa, Homo sapiens
TWIAPPLQV

SEQ ID NO: 3785 - protein, 10 aa, Homo sapiens
HPLYDMSLLK

SEQ ID NO: 3786 - protein, 9 aa, Homo sapiens
PLYDMSLLK

SEQ ID NO: 3787 - protein, 10 aa, Homo sapiens
VLTAAHCIRK

SEQ ID NO: 3788 - protein, 9 aa, Homo sapiens
LTAAHCIRK

SEQ ID NO: 3789 - protein, 11 aa, Homo sapiens
SLYTKVVHYRK

SEQ ID NO: 3790 - protein, 12 aa, Homo sapiens
FPHPLYDMSLLK

SEQ ID NO: 3791 - protein, 9 aa, Homo sapiens
SLYTKVVHY

SEQ ID NO: 3792 - protein, 10 aa, Homo sapiens
SLYTKVVHYR

SEQ ID NO: 3793 - protein, 11 aa, Homo sapiens
PHPLYDMSLLK

SEQ ID NO: 3794 - protein, 10 aa, Homo sapiens
KVVHYRKWIK

SEQ ID NO: 3795 - protein, 11 aa, Homo sapiens
SIEPEEFLTPK

SEQ ID NO: 3796 - protein, 9 aa, Homo sapiens
ALPERPSLY

SEQ ID NO: 3797 - protein, 11 aa, Homo sapiens
WVLTAAHCIRK

SEQ ID NO: 3798 - protein, 9 aa, Homo sapiens
AVCGGVLVH

SEQ ID NO: 3799 - protein, 11 aa, Homo sapiens
ALPERPSLYTK

SEQ ID NO: 3800 - protein, 9 aa, Homo sapiens
LTAAHCIRK

SEQ ID NO: 3801 - protein, 10 aa, Homo sapiens
HPLYDMSLLK

SEQ ID NO: 3802 - protein, 9 aa, Homo sapiens
STCSVSHPY

SEQ ID NO: 3803 - protein, 12 aa, Homo sapiens
GSIEPEEFLTPK

SEQ ID NO: 3804 - protein, 9 aa, Homo sapiens
SSHDLMLLR

SEQ ID NO: 3805 - protein, 10 aa, Homo sapiens
LTAAHCIRNK

SEQ ID NO: 3806 - protein, 10 aa, Homo sapiens
VLTAAHCIRK

SEQ ID NO: 3807 - protein, 9 aa, Homo sapiens
PLYDMSLLK

SEQ ID NO: 3808 - protein, 10 aa, Homo sapiens
SLYTKVVHYR

SEQ ID NO: 3809 - protein, 9 aa, Homo sapiens
GAAPLILSR

SEQ ID NO: 3810 - protein, 9 aa, Homo sapiens
AVCGGVLVH

SEQ ID NO: 3811 - protein, 9 aa, Homo sapiens
GVLQGITSW

SEQ ID NO: 3812 - protein, 9 aa, Homo sapiens
STCSWVILI

SEQ ID NO: 3813 - protein, 10 aa, Homo sapiens
RIVGGWECEK

SEQ ID NO: 3814 - protein, 11 aa, Homo sapiens
WVLTAAHCIRK

SEQ ID NO: 3815 - protein, 9 aa, Homo sapiens
QVHPQKVTK

SEQ ID NO: 3816 - protein, 9 aa, Homo sapiens
CYASGWGSI

SEQ ID NO: 3817 - protein, 9 aa, Homo sapiens
TWIGAAPLI

SEQ ID NO: 3818 - protein, 9 aa, Homo sapiens
VFLTLSVTW

SEQ ID NO: 3819 - protein, 10 aa, Homo sapiens
MWVPVVFLTL

SEQ ID NO: 3820 - protein, 9 aa, Homo sapiens
KFMLCAGRW

SEQ ID NO: 3821 - protein, 10 aa, Homo sapiens
VVFLTLSVTW

SEQ ID NO: 3822 - protein, 10 aa, Homo sapiens
HYRKWIKDTI

SEQ ID NO: 3823 - protein, 10 aa, Homo sapiens
VTWIGAAPLI

SEQ ID NO: 3824 - protein, 10 aa, Homo sapiens
TCYASGWGSI

SEQ ID NO: 3825 - protein, 9 aa, Homo sapiens
ILLGRHSLF

SEQ ID NO: 3826 - protein, 9 aa, Homo sapiens
VHPQKVTKF

SEQ ID NO: 3827 - protein, 11 aa, Homo sapiens
LFHPEDTGQVF

SEQ ID NO: 3828 - protein, 8 aa, Homo sapiens
VFQVSHSF

SEQ ID NO: 3829 - protein, 10 aa, Homo sapiens
GWGSIEPEEF

SEQ ID NO: 3830 - protein, 10 aa, Homo sapiens
FHPEDTGQVF

SEQ ID NO: 3831 - protein, 9 aa, Homo sapiens
YTKVVHYRK

SEQ ID NO: 3832 - protein, 9 aa, Homo sapiens
RGRAVCGGV

SEQ ID NO: 3833 - protein, 9 aa, Homo sapiens
VVHYRKWIK

SEQ ID NO: 3834 - protein, 9 aa, Homo sapiens
QVHPQKVTK

SEQ ID NO: 3835 - protein, 10 aa, Homo sapiens
KVVHYRKWIK

SEQ ID NO: 3836 - protein, 10 aa, Homo sapiens
KVTKFMLCAG

SEQ ID NO: 3837 - protein, 9 aa, Homo sapiens
SSLPHQVPA

SEQ ID NO: 3838 - protein, 9 aa, Homo sapiens
LTMPALPMV

SEQ ID NO: 3839 - protein, 9 aa, Homo sapiens
LTAAHCIRK

SEQ ID NO: 3840 - protein, 11 aa, Homo sapiens
ALPERPSLYTK

SEQ ID NO: 3841 - protein, 9 aa, Homo sapiens
SLYTKVVHY

SEQ ID NO: 3842 - protein, 9 aa, Homo sapiens
VCAQVHPQK

SEQ ID NO: 3843 - protein, 9 aa, Homo sapiens
HSQPWQVLV

SEQ ID NO: 3844 - protein, 8 aa, Homo sapiens
HSFPHPLY

SEQ ID NO: 3845 - protein, 9 aa, Homo sapiens
HSFPHPLYD

SEQ ID NO: 3846 - protein, 10 aa, Homo sapiens
LTAAHCIRNK

SEQ ID NO: 3847 - protein, 9 aa, Homo sapiens
SVTWIAPPL

SEQ ID NO: 3848 - protein, 10 aa, Homo sapiens
MSLLKNRFLR

SEQ ID NO: 3849 - protein, 9 aa, Homo sapiens
LYTKVVHYR

SEQ ID NO: 3850 - protein, 8 aa, Homo sapiens
YTKVVHYR

SEQ ID NO: 3851 - protein, 10 aa, Homo sapiens
SLYTKVVHYR

SEQ ID NO: 3852 - protein, 9 aa, Homo sapiens
SLLKNRFLR

SEQ ID NO: 3853 - protein, 10 aa, Homo sapiens
VTKFMLCAGR

SEQ ID NO: 3854 - protein, 9 aa, Homo sapiens
YTKVVHYRK

SEQ ID NO: 3855 - protein, 11 aa, Homo sapiens
DMSLLKNRFLR

SEQ ID NO: 3856 - protein, 9 aa, Homo sapiens
SSHDLMLLR

SEQ ID NO: 3857 - protein, 9 aa, Homo sapiens
YDMSLLKNR

SEQ ID NO: 3858 - protein, 9 aa, Homo sapiens
EALSPPTQH

SEQ ID NO: 3859 - protein, 9 aa, Homo sapiens
GAAPLILSR

SEQ ID NO: 3860 - protein, 9 aa, Homo sapiens
QVLVASRGR

SEQ ID NO: 3861 - protein, 9 aa, Homo sapiens
LPMVLHGSL

SEQ ID NO: 3862 - protein, 10 aa, Homo sapiens
ALPMVLHGSL

SEQ ID NO: 3863 - protein, 10 aa, Homo sapiens
SPDRELGSFL

SEQ ID NO: 3864 - protein, 12 aa, Homo sapiens
MPALPMVLHGSL

SEQ ID NO: 3865 - protein, 9 aa, Homo sapiens
RPSLYTKVV

SEQ ID NO: 3866 - protein, 10 aa, Homo sapiens
LPMVLHGSLV

SEQ ID NO: 3867 - protein, 10 aa, Homo sapiens
SPSILQQSSL

SEQ ID NO: 3868 - protein, 10 aa, Homo sapiens
FPHPLYDMSL

SEQ ID NO: 3869 - protein, 9 aa, Homo sapiens
GPLVCNGVL

SEQ ID NO: 3870 - protein, 9 aa, Homo sapiens
QPAPCSQLL

SEQ ID NO: 3871 - protein, 9 aa, Homo sapiens
APSHLPQNF

SEQ ID NO: 3872 - protein, 8 aa, Homo sapiens
QPAPCSQL

SEQ ID NO: 3873 - protein, 9 aa, Homo sapiens
SPDCQAEAL

SEQ ID NO: 3874 - protein, 8 aa, Homo sapiens
MPALPMVL

SEQ ID NO: 3875 - protein, 8 aa, Homo sapiens
VPVVFLTL

SEQ ID NO: 3876 - protein, 9 aa, Homo sapiens
CIRNKSVIL

SEQ ID NO: 3877 - protein, 9 aa, Homo sapiens
LPMVLHGSL

SEQ ID NO: 3878 - protein, 8 aa, Homo sapiens
ILLGRHSL

SEQ ID NO: 3879 - protein, 10 aa, Homo sapiens
LMLLRLSEPA

SEQ ID NO: 3880 - protein, 9 aa, Homo sapiens
LVASRGRAV

SEQ ID NO: 3881 - protein, 9 aa, Homo sapiens
ILLGRHSLF

SEQ ID NO: 3882 - protein, 12 aa, Homo sapiens
LMLLRLSEPAEL

SEQ ID NO: 3883 - protein, 10 aa, Homo sapiens
FPHPLYDMSL

SEQ ID NO: 3884 - protein, 10 aa, Homo sapiens
LLKNRFLRPG

SEQ ID NO: 3885 - protein, 10 aa, Homo sapiens
HCIRNKSVIL

SEQ ID NO: 3886 - protein, 8 aa, Homo sapiens
HPLYDMSL

SEQ ID NO: 3887 - protein, 8 aa, Homo sapiens
WVILITEL

SEQ ID NO: 3888 - protein, 8 aa, Homo sapiens
ELGSFLSL

SEQ ID NO: 3889 - protein, 8 aa, Homo sapiens
HPSPDREL

SEQ ID NO: 3890 - protein, 8 aa, Homo sapiens
TPKKLQCV

SEQ ID NO: 3891 - protein, 9 aa, Homo sapiens
VILLGRHSL

SEQ ID NO: 3892 - protein, 8 aa, Homo sapiens
DVLTPKKL

SEQ ID NO: 3893 - protein, 9 aa, Homo sapiens
FLTPKKLQC

SEQ ID NO: 3894 - protein, 9 aa, Homo sapiens
RELGSFLSL

SEQ ID NO: 3895 - protein, 9 aa, Homo sapiens
LTMPALPMV

SEQ ID NO: 3896 - protein, 9 aa, Homo sapiens
STCSWVILI

SEQ ID NO: 3897 - protein, 10 aa, Homo sapiens
LQAHTPSPSI

SEQ ID NO: 3898 - protein, 9 aa, Homo sapiens
RAVCGGVLV

SEQ ID NO: 3899 - protein, 10 aa, Homo sapiens
VTWIGAAPLI

SEQ ID NO: 3900 - protein, 9 aa, Homo sapiens
LQCVDLHVI

SEQ ID NO: 3901 - protein, 11 aa, Homo sapiens
TELTMPALPMV

SEQ ID NO: 3902 - protein, 9 aa, Homo sapiens
HSQPWQVLV

SEQ ID NO: 3903 - protein, 8 aa, Homo sapiens
AQVHPQKV

SEQ ID NO: 3904 - protein, 9 aa, Homo sapiens
QQSSLPHQV

SEQ ID NO: 3905 - protein, 9 aa, Homo sapiens
GVLVHPQWV

SEQ ID NO: 3906 - protein, 8 aa, Homo sapiens
ELTDAVKV

SEQ ID NO: 3907 - protein, 9 aa, Homo sapiens
HLPQNFLPI

SEQ ID NO: 3908 - protein, 8 aa, Homo sapiens
SQPWQVLV

SEQ ID NO: 3909 - protein, 9 aa, Homo sapiens
AELTDAVKV

SEQ ID NO: 3910 - protein, 10 aa, Homo sapiens
HSFPHPLYDM

SEQ ID NO: 3911 - protein, 9 aa, Homo sapiens
WIAPPLQVL

SEQ ID NO: 3912 - protein, 10 aa, Homo sapiens
LTMPALPMVL

SEQ ID NO: 3913 - protein, 9 aa, Homo sapiens
QVFQVSHSF

SEQ ID NO: 3914 - protein, 9 aa, Homo sapiens
LTMPALPMV

SEQ ID NO: 3915 - protein, 9 aa, Homo sapiens
STCSVSHPY

SEQ ID NO: 3916 - protein, 9 aa, Homo sapiens
VSHSFPHPL

SEQ ID NO: 3917 - protein, 9 aa, Homo sapiens
TMPALPMVL

SEQ ID NO: 3918 - protein, 9 aa, Homo sapiens
HLPQNFLPI

SEQ ID NO: 3919 - protein, 9 aa, Homo sapiens
WIKDTIVAN

SEQ ID NO: 3920 - protein, 9 aa, Homo sapiens
VSHPYSQDL

SEQ ID NO: 3921 - protein, 9 aa, Homo sapiens
SLYTKVVHY

SEQ ID NO: 3922 - protein, 9 aa, Homo sapiens
ALPERPSLY

SEQ ID NO: 3923 - protein, 8 aa, Homo sapiens
GSIEPEEF

SEQ ID NO: 3924 - protein, 8 aa, Homo sapiens
VSHPYSQD

SEQ ID NO: 3925 - protein, 9 aa, Homo sapiens
SLPAPLQAH

SEQ ID NO: 3926 - protein, 9 aa, Homo sapiens
TMPALPMVL

SEQ ID NO: 3927 - protein, 9 aa, Homo sapiens
WIAPPLQVL

SEQ ID NO: 3928 - protein, 9 aa, Homo sapiens
VSHSFPHPL

SEQ ID NO: 3929 - protein, 9 aa, Homo sapiens
VTWIGAAPL

SEQ ID NO: 3930 - protein, 9 aa, Homo sapiens
HLPQNFLPI

SEQ ID NO: 3931 - protein, 9 aa, Homo sapiens
ITELTMPAL

SEQ ID NO: 3932 - protein, 10 aa, Homo sapiens
LTMPALPMVL

SEQ ID NO: 3933 - protein, 9 aa, Homo sapiens
IAPPLQVLV

SEQ ID NO: 3934 - protein, 9 aa, Homo sapiens
SVTWIAPPL

SEQ ID NO: 3935 - protein, 8 aa, Homo sapiens
ALPERPSL

SEQ ID NO: 3936 - protein, 9 aa, Homo sapiens
WVPVVFLTL

SEQ ID NO: 3937 - protein, 10 aa, Homo sapiens
ASPDCQAEAL

SEQ ID NO: 3938 - protein, 8 aa, Homo sapiens
IAPPLQVL

SEQ ID NO: 3939 - protein, 9 aa, Homo sapiens
AQPAPCSQL

SEQ ID NO: 3940 - protein, 9 aa, Homo sapiens
QHPSPDREL

SEQ ID NO: 3941 - protein, 9 aa, Homo sapiens
DLPTQEPAL

SEQ ID NO: 3942 - protein, 9 aa, Homo sapiens
SLPAPLQAH

SEQ ID NO: 3943 - protein, 9 aa, Homo sapiens
WIAPPLQVL

SEQ ID NO: 3944 - protein, 9 aa, Homo sapiens
VSHSFPHPL

SEQ ID NO: 3945 - protein, 9 aa, Homo sapiens
VTWIGAAPL

SEQ ID NO: 3946 - protein, 9 aa, Homo sapiens
SVTWIAPPL

SEQ ID NO: 3947 - protein, 9 aa, Homo sapiens
LTMPALPMV

SEQ ID NO: 3948 - protein, 9 aa, Homo sapiens
LAVCGGVLV

SEQ ID NO: 3949 - protein, 9 aa, Homo sapiens
CALPERPSL

SEQ ID NO: 3950 - protein, 9 aa, Homo sapiens
RAVCGGVLV

SEQ ID NO: 3951 - protein, 10 aa, Homo sapiens
LTMPALPMVL

SEQ ID NO: 3952 - protein, 8 aa, Homo sapiens
IAPPLQVL

SEQ ID NO: 3953 - protein, 9 aa, Homo sapiens
VSHPYSQDL

SEQ ID NO: 3954 - protein, 8 aa, Homo sapiens
LAVCGGVL

SEQ ID NO: 3955 - protein, 9 aa, Homo sapiens
HQVPAPSHL

SEQ ID NO: 3956 - protein, 9 aa, Homo sapiens
WVPVVFLTL

SEQ ID NO: 3957 - protein, 10 aa, Homo sapiens
FHPEDTGQVF

SEQ ID NO: 3958 - protein, 9 aa, Homo sapiens
SFPHPLYDM

SEQ ID NO: 3959 - protein, 9 aa, Homo sapiens
SHSFPHPLY

SEQ ID NO: 3960 - protein, 9 aa, Homo sapiens
TMPALPMVL

SEQ ID NO: 3961 - protein, 9 aa, Homo sapiens
CYASGWGSI

SEQ ID NO: 3962 - protein, 11 aa, Homo sapiens
LYDMSLLKNRF

SEQ ID NO: 3963 - protein, 9 aa, Homo sapiens
SFLSLPAPL

SEQ ID NO: 3964 - protein, 9 aa, Homo sapiens
WIAPPLQVL

SEQ ID NO: 3965 - protein, 9 aa, Homo sapiens
HLPQNFLPI

SEQ ID NO: 3966 - protein, 8 aa, Homo sapiens
MWVPVVFL

SEQ ID NO: 3967 - protein, 8 aa, Homo sapiens
VFQVSHSF

SEQ ID NO: 3968 - protein, 9 aa, Homo sapiens
SWVILITEL

SEQ ID NO: 3969 - protein, 8 aa, Homo sapiens
RLSEPAEL

SEQ ID NO: 3970 - protein, 8 aa, Homo sapiens
FLSLPAPL

SEQ ID NO: 3971 - protein, 8 aa, Homo sapiens
VMDLPTQE

SEQ ID NO: 3972 - protein, 8 aa, Homo sapiens
SIEPEEFL

SEQ ID NO: 3973 - protein, 8 aa, Homo sapiens
HTPSPSIL

SEQ ID NO: 3974 - protein, 9 aa, Homo sapiens
IRNKSVILL

SEQ ID NO: 3975 - protein, 9 aa, Homo sapiens
YRKWIKDTI

SEQ ID NO: 3976 - protein, 10 aa, Homo sapiens
HSFPHPLYDM

SEQ ID NO: 3977 - protein, 9 aa, Homo sapiens
LRLSEPAEL

SEQ ID NO: 3978 - protein, 9 aa, Homo sapiens
HSQPWQVLV

SEQ ID NO: 3979 - protein, 10 aa, Homo sapiens
CIRNKSVILL

SEQ ID NO: 3980 - protein, 9 aa, Homo sapiens
GRAVCGGVL

SEQ ID NO: 3981 - protein, 10 aa, Homo sapiens
YRKWIKDTIV

SEQ ID NO: 3982 - protein, 9 aa, Homo sapiens
MSLLKNRFL

SEQ ID NO: 3983 - protein, 12 aa, Homo sapiens
HSFPHPLYDMSL

SEQ ID NO: 3984 - protein, 9 aa, Homo sapiens
HSFPHPLYD

SEQ ID NO: 3985 - protein, 8 aa, Homo sapiens
HSQPWQVL

SEQ ID NO: 3986 - protein, 9 aa, Homo sapiens
KHSQPWQVL

SEQ ID NO: 3987 - protein, 9 aa, Homo sapiens
TPGPDVLTP

SEQ ID NO: 3988 - protein, 9 aa, Homo sapiens
HPEDTGQVF

SEQ ID NO: 3989 - protein, 8 aa, Homo sapiens
HPSPDREL

SEQ ID NO: 3990 - protein, 8 aa, Homo sapiens
IRNKSVIL

SEQ ID NO: 3991 - protein, 9 aa, Homo sapiens
RELGSFLSL

SEQ ID NO: 3992 - protein, 9 aa, Homo sapiens
IRNKSVILL

SEQ ID NO: 3993 - protein, 9 aa, Homo sapiens
YRKWIKDTI

SEQ ID NO: 3994 - protein, 10 aa, Homo sapiens
HSFPHPLYDM

SEQ ID NO: 3995 - protein, 9 aa, Homo sapiens
LRLSEPAEL

SEQ ID NO: 3996 - protein, 9 aa, Homo sapiens
TMPALPMVL

SEQ ID NO: 3997 - protein, 9 aa, Homo sapiens
VHPQKVTKF

SEQ ID NO: 3998 - protein, 9 aa, Homo sapiens
VSHSFPHPL

SEQ ID NO: 3999 - protein, 9 aa, Homo sapiens
SHSFPHPLY

SEQ ID NO: 4000 - protein, 9 aa, Homo sapiens
SFPHPLYDM

SEQ ID NO: 4001 - protein, 9 aa, Homo sapiens
CYASGWGSI

SEQ ID NO: 4002 - protein, 9 aa, Homo sapiens
LRPGDDSTL

SEQ ID NO: 4003 - protein, 8 aa, Homo sapiens
IAPPLQVL

SEQ ID NO: 4004 - protein, 8 aa, Homo sapiens
IRNKSVIL

SEQ ID NO: 4005 - protein, 8 aa, Homo sapiens
ALPERPSL

SEQ ID NO: 4006 - protein, 8 aa, Homo sapiens
LYTKVVHY

SEQ ID NO: 4007 - protein, 9 aa, Homo sapiens
ALPERPSLY

SEQ ID NO: 4008 - protein, 10 aa, Homo sapiens
VSEEVCSKLY

SEQ ID NO: 4009 - protein, 9 aa, Homo sapiens
CSKLYDPLY

SEQ ID NO: 4010 - protein, 11 aa, Homo sapiens
LSAAHCFQNSY

SEQ ID NO: 4011 - protein, 11 aa, Homo sapiens
VVSEEVCSKLY

SEQ ID NO: 4012 - protein, 12 aa, Homo sapiens
VLSAAHCFQNSY

SEQ ID NO: 4013 - protein, 12 aa, Homo sapiens
SVVSEEVCSKLY

SEQ ID NO: 4014 - protein, 10 aa, Homo sapiens
SAAHCFQNSY

SEQ ID NO: 4015 - protein, 10 aa, Homo sapiens
ASLSVRHPEY

SEQ ID NO: 4016 - protein, 9 aa, Homo sapiens
SLSVRHPEY

SEQ ID NO: 4017 - protein, 9 aa, Homo sapiens
VSEEVCSKL

SEQ ID NO: 4018 - protein, 9 aa, Homo sapiens
VSESDTIRS

SEQ ID NO: 4019 - protein, 9 aa, Homo sapiens
KLDESVSES

SEQ ID NO: 4020 - protein, 8 aa, Homo sapiens
FTEWIEKT

SEQ ID NO: 4021 - protein, 9 aa, Homo sapiens
SEEVCSKLY

SEQ ID NO: 4022 - protein, 9 aa, Homo sapiens
ESDTIRSIS

SEQ ID NO: 4023 - protein, 9 aa, Homo sapiens
FLGYLILGV

SEQ ID NO: 4024 - protein, 9 aa, Homo sapiens
LLANDLMLI

SEQ ID NO: 4025 - protein, 9 aa, Homo sapiens
FQNSYTIGL

SEQ ID NO: 4026 - protein, 9 aa, Homo sapiens
QMVEASLSV

SEQ ID NO: 4027 - protein, 9 aa, Homo sapiens
MLIKLDESV

SEQ ID NO: 4028 - protein, 9 aa, Homo sapiens
VLQCVNVSV

SEQ ID NO: 4029 - protein, 10 aa, Homo sapiens
LLANGRMPTV

SEQ ID NO: 4030 - protein, 10 aa, Homo sapiens
SQMVEASLSV

SEQ ID NO: 4031 - protein, 10 aa, Homo sapiens
YLILGVAGSL

SEQ ID NO: 4032 - protein, 10 aa, Homo sapiens
WFLGYLILGV

SEQ ID NO: 4033 - protein, 9 aa, Homo sapiens
RMPTVLQCV

SEQ ID NO: 4034 - protein, 10 aa, Homo sapiens
FLGYLILGVA

SEQ ID NO: 4035 - protein, 11 aa, Homo sapiens
YLILGVAGSLV

SEQ ID NO: 4036 - protein, 10 aa, Homo sapiens
LMLIKLDESV

SEQ ID NO: 4037 - protein, 10 aa, Homo sapiens
VLQCVNVSVV

SEQ ID NO: 4038 - protein, 10 aa, Homo sapiens
PLLANDLMLI

SEQ ID NO: 4039 - protein, 11 aa, Homo sapiens
GLLANGRMPTV

SEQ ID NO: 4040 - protein, 12 aa, Homo sapiens
YNRPLLANDLML

SEQ ID NO: 4041 - protein, 10 aa, Homo sapiens
TVLQCVNVSV

SEQ ID NO: 4042 - protein, 10 aa, Homo sapiens
NELFCSGVLV

SEQ ID NO: 4043 - protein, 10 aa, Homo sapiens
KLYDPLYHPS

SEQ ID NO: 4044 - protein, 12 aa, Homo sapiens
MENELFCSGVLV

SEQ ID NO: 4045 - protein, 10 aa, Homo sapiens
RPLLANDLML

SEQ ID NO: 4046 - protein, 9 aa, Homo sapiens
ILGVAGSLV

SEQ ID NO: 4047 - protein, 12 aa, Homo sapiens
MPTVLQCVNVSV

SEQ ID NO: 4048 - protein, 9 aa, Homo sapiens
YLILGVAGS

SEQ ID NO: 4049 - protein, 9 aa, Homo sapiens
ELFCSGVLV

SEQ ID NO: 4050 - protein, 11 aa, Homo sapiens
KLYDPLYHPSM

SEQ ID NO: 4051 - protein, 9 aa, Homo sapiens
KLYDPLYHP

SEQ ID NO: 4052 - protein, 9 aa, Homo sapiens
KLDESVSES

SEQ ID NO: 4053 - protein, 11 aa, Homo sapiens
LLANDLMLIKL

SEQ ID NO: 4054 - protein, 9 aa, Homo sapiens
GLGLHSLEA

SEQ ID NO: 4055 - protein, 9 aa, Homo sapiens
PLLANDLML

SEQ ID NO: 4056 - protein, 10 aa, Homo sapiens
YTIGLGLHSL

SEQ ID NO: 4057 - protein, 9 aa, Homo sapiens
YLQGLVSFG

SEQ ID NO: 4058 - protein, 8 aa, Homo sapiens
KLYDPLYH

SEQ ID NO: 4059 - protein, 8 aa, Homo sapiens
GLLANECL

SEQ ID NO: 4060 - protein, 8 aa, Homo sapiens
YLQGLVSF

SEQ ID NO: 4061 - protein, 9 aa, Homo sapiens
CLVSGWGLL

SEQ ID NO: 4062 - protein, 9 aa, Homo sapiens
TIGLGLHSL

SEQ ID NO: 4063 - protein, 10 aa, Homo sapiens
VLSAAHCFQK

SEQ ID NO: 4064 - protein, 10 aa, Homo sapiens
LLANDLMLIK

SEQ ID NO: 4065 - protein, 10 aa, Homo sapiens
YLQGLVSFGK

SEQ ID NO: 4066 - protein, 9 aa, Homo sapiens
LSAAHCFQK

SEQ ID NO: 4067 - protein, 12 aa, Homo sapiens
SMFCAGGGHDQK

SEQ ID NO: 4068 - protein, 11 aa, Homo sapiens
WVLSAAHCFQK

SEQ ID NO: 4069 - protein, 8 aa, Homo sapiens
KLYDPLYH

SEQ ID NO: 4070 - protein, 9 aa, Homo sapiens
LANDLMLIK

SEQ ID NO: 4071 - protein, 12 aa, Homo sapiens
QWVLSAAHCFQK

SEQ ID NO: 4072 - protein, 11 aa, Homo sapiens
PLLANDLMLIK

SEQ ID NO: 4073 - protein, 9 aa, Homo sapiens
KLYDPLYHP

SEQ ID NO: 4074 - protein, 9 aa, Homo sapiens
VVSEEVCSK

SEQ ID NO: 4075 - protein, 9 aa, Homo sapiens
NPWGWFLGY

SEQ ID NO: 4076 - protein, 9 aa, Homo sapiens
ATAGNPWGW

SEQ ID NO: 4077 - protein, 9 aa, Homo sapiens
SVSESDTIR

SEQ ID NO: 4078 - protein, 10 aa, Homo sapiens
SVVSEEVCSK

SEQ ID NO: 4079 - protein, 9 aa, Homo sapiens
LSAAHCFQK

SEQ ID NO: 4080 - protein, 10 aa, Homo sapiens
VLSAAHCFQK

SEQ ID NO: 4081 - protein, 10 aa, Homo sapiens
SVVSEEVCSK

SEQ ID NO: 4082 - protein, 10 aa, Homo sapiens
LLANDLMLIK

SEQ ID NO: 4083 - protein, 9 aa, Homo sapiens
LANDLMLIK

SEQ ID NO: 4084 - protein, 9 aa, Homo sapiens
VVSEEVCSK

SEQ ID NO: 4085 - protein, 10 aa, Homo sapiens
YLQGLVSFGK

SEQ ID NO: 4086 - protein, 9 aa, Homo sapiens
LQGLVSFGK

SEQ ID NO: 4087 - protein, 12 aa, Homo sapiens
SMFCAGGGHDQK

SEQ ID NO: 4088 - protein, 11 aa, Homo sapiens
WVLSAAHCFQK

SEQ ID NO: 4089 - protein, 11 aa, Homo sapiens
GVPGVYTNLCK

SEQ ID NO: 4090 - protein, 9 aa, Homo sapiens
SVSESDTIR

SEQ ID NO: 4091 - protein, 9 aa, Homo sapiens
ATAGNPWGW

SEQ ID NO: 4092 - protein, 9 aa, Homo sapiens
GVAGSLVSG

SEQ ID NO: 4093 - protein, 9 aa, Homo sapiens
CKFTEWIEK

SEQ ID NO: 4094 - protein, 9 aa, Homo sapiens
GYLQGLVSF

SEQ ID NO: 4095 - protein, 10 aa, Homo sapiens
NGYLQGLVSF

SEQ ID NO: 4096 - protein, 10 aa, Homo sapiens
PWGWFLGYLI

SEQ ID NO: 4097 - protein, 12 aa, Homo sapiens
ICNGYLQGLVSF

SEQ ID NO: 4098 - protein, 11 aa, Homo sapiens
LYDPLYHPSMF

SEQ ID NO: 4099 - protein, 11 aa, Homo sapiens
VYTNLCKFTEW

SEQ ID NO: 4100 - protein, 11 aa, Homo sapiens
CNGYLQGLVSF

SEQ ID NO: 4101 - protein, 9 aa, Homo sapiens
GWFLGYLIL

SEQ ID NO: 4102 - protein, 12 aa, Homo sapiens
KLYDPLYHPSMF

SEQ ID NO: 4103 - protein, 9 aa, Homo sapiens
ALVMENELF

SEQ ID NO: 4104 - protein, 11 aa, Homo sapiens
SYTIGLGLHSL

SEQ ID NO: 4105 - protein, 8 aa, Homo sapiens
SYTIGLGL

SEQ ID NO: 4106 - protein, 10 aa, Homo sapiens
LYDPLYHPSM

SEQ ID NO: 4107 - protein, 9 aa, Homo sapiens
SYTIGLGLH

SEQ ID NO: 4108 - protein, 10 aa, Homo sapiens
VYTNLCKFTE

SEQ ID NO: 4109 - protein, 9 aa, Homo sapiens
LSAAHCFQK

SEQ ID NO: 4110 - protein, 9 aa, Homo sapiens
TIRSISIAS

SEQ ID NO: 4111 - protein, 10 aa, Homo sapiens
VLSAAHCFQK

SEQ ID NO: 4112 - protein, 9 aa, Homo sapiens
LANDLMLIK

SEQ ID NO: 4113 - protein, 9 aa, Homo sapiens
ASLSVRHPE

SEQ ID NO: 4114 - protein, 12 aa, Homo sapiens
RSISIASQCPTA

SEQ ID NO: 4115 - protein, 9 aa, Homo sapiens
AAHCFQNSY

SEQ ID NO: 4116 - protein, 9 aa, Homo sapiens
LVHPQWVLS

SEQ ID NO: 4117 - protein, 9 aa, Homo sapiens
LYHPSMFCA

SEQ ID NO: 4118 - protein, 8 aa, Homo sapiens
KFTEWIEK

SEQ ID NO: 4119 - protein, 9 aa, Homo sapiens
VVSEEVCSK

SEQ ID NO: 4120 - protein, 9 aa, Homo sapiens
RSISIASQC

SEQ ID NO: 4121 - protein, 10 aa, Homo sapiens
SVVSEEVCSK

SEQ ID NO: 4122 - protein, 9 aa, Homo sapiens
CKFTEWIEK

SEQ ID NO: 4123 - protein, 10 aa, Homo sapiens
LCKFTEWIEK

SEQ ID NO: 4124 - protein, 10 aa, Homo sapiens
ASLSVRHPEY

SEQ ID NO: 4125 - protein, 9 aa, Homo sapiens
GVPGVYTNL

SEQ ID NO: 4126 - protein, 9 aa, Homo sapiens
SVRHPEYNR

SEQ ID NO: 4127 - protein, 9 aa, Homo sapiens
SVRHPEYNR

SEQ ID NO: 4128 - protein, 9 aa, Homo sapiens
MVEASLSVR

SEQ ID NO: 4129 - protein, 10 aa, Homo sapiens
LSVRHPEYNR

SEQ ID NO: 4130 - protein, 10 aa, Homo sapiens
SGWGLLANGR

SEQ ID NO: 4131 - protein, 11 aa, Homo sapiens
SLSVRHPEYNR

SEQ ID NO: 4132 - protein, 10 aa, Homo sapiens
QMVEASLSVR

SEQ ID NO: 4133 - protein, 9 aa, Homo sapiens
SVSESDTIR

SEQ ID NO: 4134 - protein, 12 aa, Homo sapiens
ASLSVRHPEYNR

SEQ ID NO: 4135 - protein, 9 aa, Homo sapiens
LSAAHCFQK

SEQ ID NO: 4136 - protein, 9 aa, Homo sapiens
EYNRPLLAN

SEQ ID NO: 4137 - protein, 10 aa, Homo sapiens
ESVSESDTIR

SEQ ID NO: 4138 - protein, 9 aa, Homo sapiens
EWIEKTVQA

SEQ ID NO: 4139 - protein, 10 aa, Homo sapiens
EYNRPLLAND

SEQ ID NO: 4140 - protein, 9 aa, Homo sapiens
TNLCKFTEW

SEQ ID NO: 4141 - protein, 9 aa, Homo sapiens
WFLGYLILG

SEQ ID NO: 4142 - protein, 9 aa, Homo sapiens
HPQWVLSAA

SEQ ID NO: 4143 - protein, 9 aa, Homo sapiens
HPEYNRPLL

SEQ ID NO: 4144 - protein, 10 aa, Homo sapiens
RHPEYNRPLL

SEQ ID NO: 4145 - protein, 11 aa, Homo sapiens
SPHSQPWQAAL

SEQ ID NO: 4146 - protein, 9 aa, Homo sapiens
QPWQAALVM

SEQ ID NO: 4147 - protein, 10 aa, Homo sapiens
SQPWQAALVM

SEQ ID NO: 4148 - protein, 9 aa, Homo sapiens
RPLLANDLM

SEQ ID NO: 4149 - protein, 9 aa, Homo sapiens
CPTAGNSCL

SEQ ID NO: 4150 - protein, 10 aa, Homo sapiens
RPLLANDLML

SEQ ID NO: 4151 - protein, 10 aa, Homo sapiens
NPWGWFLGYL

SEQ ID NO: 4152 - protein, 10 aa, Homo sapiens
SPHSQPWQAA

SEQ ID NO: 4153 - protein, 8 aa, Homo sapiens
RPLLANDL

SEQ ID NO: 4154 - protein, 9 aa, Homo sapiens
HPQWVLSAA

SEQ ID NO: 4155 - protein, 10 aa, Homo sapiens
LMLIKLDESV

SEQ ID NO: 4156 - protein, 10 aa, Homo sapiens
LANGRMPTVL

SEQ ID NO: 4157 - protein, 10 aa, Homo sapiens
YDPLYHPSMF

SEQ ID NO: 4158 - protein, 9 aa, Homo sapiens
TIGLGLHSL

SEQ ID NO: 4159 - protein, 8 aa, Homo sapiens
HPEYNRPL

SEQ ID NO: 4160 - protein, 10 aa, Homo sapiens
YLILGVAGSL

SEQ ID NO: 4161 - protein, 9 aa, Homo sapiens
LANGRMPTV

SEQ ID NO: 4162 - protein, 10 aa, Homo sapiens
LLANGRMPTV

SEQ ID NO: 4163 - protein, 8 aa, Homo sapiens
YLQGLVSF

SEQ ID NO: 4164 - protein, 8 aa, Homo sapiens
NGRMPTVL

SEQ ID NO: 4165 - protein, 8 aa, Homo sapiens
IGLGLHSL

SEQ ID NO: 4166 - protein, 8 aa, Homo sapiens
DLMLIKLD

SEQ ID NO: 4167 - protein, 8 aa, Homo sapiens
LIKLDESV

SEQ ID NO: 4168 - protein, 8 aa, Homo sapiens
EWIEKTVQ

SEQ ID NO: 4169 - protein, 8 aa, Homo sapiens
YLILGVAG

SEQ ID NO: 4170 - protein, 8 aa, Homo sapiens
HPQWVLSA

SEQ ID NO: 4171 - protein, 12 aa, Homo sapiens
MENELFCSGVLV

SEQ ID NO: 4172 - protein, 10 aa, Homo sapiens
MENELFCSGV

SEQ ID NO: 4173 - protein, 9 aa, Homo sapiens
WGWFLGYLI

SEQ ID NO: 4174 - protein, 10 aa, Homo sapiens
SQMVEASLSV

SEQ ID NO: 4175 - protein, 10 aa, Homo sapiens
NELFCSGVLV

SEQ ID NO: 4176 - protein, 9 aa, Homo sapiens
SESDTIRSI

SEQ ID NO: 4177 - protein, 12 aa, Homo sapiens
GNPWGWFLGYLI

SEQ ID NO: 4178 - protein, 11 aa, Homo sapiens
MENELFCSGVL

SEQ ID NO: 4179 - protein, 9 aa, Homo sapiens
HCFQNSYTI

SEQ ID NO: 4180 - protein, 9 aa, Homo sapiens
DQEPGSQMV

SEQ ID NO: 4181 - protein, 9 aa, Homo sapiens
RMPTVLQCV

SEQ ID NO: 4182 - protein, 9 aa, Homo sapiens
ELFCSGVLV

SEQ ID NO: 4183 - protein, 9 aa, Homo sapiens
SQPWQAALV

SEQ ID NO: 4184 - protein, 9 aa, Homo sapiens
FLGYLILGV

SEQ ID NO: 4185 - protein, 8 aa, Homo sapiens
GQVGVPGV

SEQ ID NO: 4186 - protein, 10 aa, Homo sapiens
YTIGLGLHSL

SEQ ID NO: 4187 - protein, 9 aa, Homo sapiens
AAHCFQNSY

SEQ ID NO: 4188 - protein, 9 aa, Homo sapiens
FQNSYTIGL

SEQ ID NO: 4189 - protein, 9 aa, Homo sapiens
GQVGVPGVY

SEQ ID NO: 4190 - protein, 10 aa, Homo sapiens
SAAHCFQNSY

SEQ ID NO: 4191 - protein, 9 aa, Homo sapiens
QMVEASLSV

SEQ ID NO: 4192 - protein, 9 aa, Homo sapiens
LANGRMPTV

SEQ ID NO: 4193 - protein, 10 aa, Homo sapiens
YLILGVAGSL

SEQ ID NO: 4194 - protein, 9 aa, Homo sapiens
LLANDLMLI

SEQ ID NO: 4195 - protein, 10 aa, Homo sapiens
CGQVGVPGVY

SEQ ID NO: 4196 - protein, 9 aa, Homo sapiens
TAGNPWGWF

SEQ ID NO: 4197 - protein, 8 aa, Homo sapiens
YLQGLVSF

SEQ ID NO: 4198 - protein, 8 aa, Homo sapiens
KLYDPLYH

SEQ ID NO: 4199 - protein, 9 aa, Homo sapiens
SLSVRHPEY

SEQ ID NO: 4200 - protein, 9 aa, Homo sapiens
TIRSISIAS

SEQ ID NO: 4201 - protein, 9 aa, Homo sapiens
VSGWGLLAN

SEQ ID NO: 4202 - protein, 8 aa, Homo sapiens
VSVVSEEV

SEQ ID NO: 4203 - protein, 9 aa, Homo sapiens
SLVSGSCSQ

SEQ ID NO: 4204 - protein, 9 aa, Homo sapiens
FQNSYTIGL

SEQ ID NO: 4205 - protein, 9 aa, Homo sapiens
GVPGVYTNL

SEQ ID NO: 4206 - protein, 9 aa, Homo sapiens
RMPTVLQCV

SEQ ID NO: 4207 - protein, 9 aa, Homo sapiens
RHPEYNRPL

SEQ ID NO: 4208 - protein, 9 aa, Homo sapiens
LANGRMPTV

SEQ ID NO: 4209 - protein, 9 aa, Homo sapiens
NSYTIGLGL

SEQ ID NO: 4210 - protein, 10 aa, Homo sapiens
YTIGLGLHSL

SEQ ID NO: 4211 - protein, 9 aa, Homo sapiens
LLANDLMLI

SEQ ID NO: 4212 - protein, 9 aa, Homo sapiens
TIGLGLHSL

SEQ ID NO: 4213 - protein, 10 aa, Homo sapiens
QCPTAGNSCL

SEQ ID NO: 4214 - protein, 9 aa, Homo sapiens
QCPTAGNSC

SEQ ID NO: 4215 - protein, 9 aa, Homo sapiens
YDPLYHPSM

SEQ ID NO: 4216 - protein, 9 aa, Homo sapiens
NRPLLANDL

SEQ ID NO: 4217 - protein, 9 aa, Homo sapiens
KAPCGQVGV

SEQ ID NO: 4218 - protein, 10 aa, Homo sapiens
LANGRMPTVL

SEQ ID NO: 4219 - protein, 9 aa, Homo sapiens
FQNSYTIGL

SEQ ID NO: 4220 - protein, 9 aa, Homo sapiens
LANGRMPTV

SEQ ID NO: 4221 - protein, 10 aa, Homo sapiens
YTIGLGLHSL

SEQ ID NO: 4222 - protein, 9 aa, Homo sapiens
LILGVAGSL

SEQ ID NO: 4223 - protein, 9 aa, Homo sapiens
NSYTIGLGL

SEQ ID NO: 4224 - protein, 9 aa, Homo sapiens
QMVEASLSV

SEQ ID NO: 4225 - protein, 9 aa, Homo sapiens
AALVMENEL

SEQ ID NO: 4226 - protein, 10 aa, Homo sapiens
LANGRMPTVL

SEQ ID NO: 4227 - protein, 9 aa, Homo sapiens
LVSGSCSQI

SEQ ID NO: 4228 - protein, 9 aa, Homo sapiens
AGNPWGWFL

SEQ ID NO: 4229 - protein, 10 aa, Homo sapiens
TAGNPWGWFL

SEQ ID NO: 4230 - protein, 10 aa, Homo sapiens
LYDPLYHPSM

SEQ ID NO: 4231 - protein, 11 aa, Homo sapiens
LYDPLYHPSMF

SEQ ID NO: 4232 - protein, 9 aa, Homo sapiens
FQNSYTIGL

SEQ ID NO: 4233 - protein, 12 aa, Homo sapiens
KLYDPLYHPSMF

SEQ ID NO: 4234 - protein, 9 aa, Homo sapiens
RMPTVLQCV

SEQ ID NO: 4235 - protein, 10 aa, Homo sapiens
SQPWQAALVM

SEQ ID NO: 4236 - protein, 9 aa, Homo sapiens
SQPWQAALV

SEQ ID NO: 4237 - protein, 10 aa, Homo sapiens
RHPEYNRPLL

SEQ ID NO: 4238 - protein, 10 aa, Homo sapiens
CFQNSYTIGL

SEQ ID NO: 4239 - protein, 9 aa, Homo sapiens
ANDLMLIKL

SEQ ID NO: 4240 - protein, 8 aa, Homo sapiens
LYDPLYHP

SEQ ID NO: 4241 - protein, 8 aa, Homo sapiens
LFCSGVLV

SEQ ID NO: 4242 - protein, 9 aa, Homo sapiens
KLDESVSES

SEQ ID NO: 4243 - protein, 8 aa, Homo sapiens
YLQGLVSF

SEQ ID NO: 4244 - protein, 9 aa, Homo sapiens
VSEEVCSKL

SEQ ID NO: 4245 - protein, 8 aa, Homo sapiens
KLDESVSE

SEQ ID NO: 4246 - protein, 9 aa, Homo sapiens
FQNSYTIGL

SEQ ID NO: 4247 - protein, 10 aa, Homo sapiens
GRMPTVLQCV

SEQ ID NO: 4248 - protein, 10 aa, Homo sapiens
VRHPEYNRPL

SEQ ID NO: 4249 - protein, 9 aa, Homo sapiens
NRPLLANDL

SEQ ID NO: 4250 - protein, 9 aa, Homo sapiens
NSYTIGLGL

SEQ ID NO: 4251 - protein, 9 aa, Homo sapiens
LANGRMPTV

SEQ ID NO: 4252 - protein, 10 aa, Homo sapiens
NRPLLANDLM

SEQ ID NO: 4253 - protein, 9 aa, Homo sapiens
RHPEYNRPL

SEQ ID NO: 4254 - protein, 9 aa, Homo sapiens
SQPWQAALV

SEQ ID NO: 4255 - protein, 9 aa, Homo sapiens
GRMPTVLQC

SEQ ID NO: 4256 - protein, 9 aa, Homo sapiens
AGNPWGWFL

SEQ ID NO: 4257 - protein, 9 aa, Homo sapiens
ANGRMPTVL

SEQ ID NO: 4258 - protein, 9 aa, Homo sapiens
SESDTIRSI

SEQ ID NO: 4259 - protein, 9 aa, Homo sapiens
NPWGWFLGY

SEQ ID NO: 4260 - protein, 8 aa, Homo sapiens
SYTIGLGL

SEQ ID NO: 4261 - protein, 9 aa, Homo sapiens
TEWIEKTVQ

SEQ ID NO: 4262 - protein, 9 aa, Homo sapiens
FQNSYTIGL

SEQ ID NO: 4263 - protein, 9 aa, Homo sapiens
RHPEYNRPL

SEQ ID NO: 4264 - protein, 10 aa, Homo sapiens
LYDPLYHPSM

SEQ ID NO: 4265 - protein, 10 aa, Homo sapiens
VRHPEYNRPL

SEQ ID NO: 4266 - protein, 9 aa, Homo sapiens
VHPQWVLSA

SEQ ID NO: 4267 - protein, 10 aa, Homo sapiens
RHPEYNRPLL

SEQ ID NO: 4268 - protein, 9 aa, Homo sapiens
NRPLLANDL

SEQ ID NO: 4269 - protein, 10 aa, Homo sapiens
YNRPLLANDL

SEQ ID NO: 4270 - protein, 9 aa, Homo sapiens
GYLQGLVSF

SEQ ID NO: 4271 - protein, 9 aa, Homo sapiens
YDPLYHPSM

SEQ ID NO: 4272 - protein, 8 aa, Homo sapiens
SYTIGLGL

SEQ ID NO: 4273 - protein, 8 aa, Homo sapiens
VRHPEYNR

SEQ ID NO: 4274 - protein, 8 aa, Homo sapiens
YLQGLVSF

SEQ ID NO: 4275 - protein, 12 aa, Homo sapiens
SSDDKSKSNDPK

SEQ ID NO: 4276 - protein, 9 aa, Homo sapiens
SNDPKTEPK

SEQ ID NO: 4277 - protein, 10 aa, Homo sapiens
KSNDPKTEPK

SEQ ID NO: 4278 - protein, 8 aa, Homo sapiens
SSDDKSKS

SEQ ID NO: 4279 - protein, 9 aa, Homo sapiens
SSDDKSKSN

SEQ ID NO: 4280 - protein, 10 aa, Homo sapiens
SSDDKSKSND

SEQ ID NO: 4281 - protein, 10 aa, Homo sapiens
KLLQRCFEKC

SEQ ID NO: 4282 - protein, 9 aa, Homo sapiens
LLQRCFEKC

SEQ ID NO: 4283 - protein, 9 aa, Homo sapiens
CLKKLLQRC

SEQ ID NO: 4284 - protein, 10 aa, Homo sapiens
CQPSCLKKLL

SEQ ID NO: 4285 - protein, 9 aa, Homo sapiens
KLLQRCFEK

SEQ ID NO: 4286 - protein, 10 aa, Homo sapiens
CLPCPSQSPS

SEQ ID NO: 4287 - protein, 9 aa, Homo sapiens
CQPSCLKKL

SEQ ID NO: 4288 - protein, 9 aa, Homo sapiens
CLPCPSQSP

SEQ ID NO: 4289 - protein, 12 aa, Homo sapiens
KLLQRCFEKCPW

SEQ ID NO: 4290 - protein, 10 aa, Homo sapiens
KCQPSCLKKL

SEQ ID NO: 4291 - protein, 9 aa, Homo sapiens
KCPSSCPHA

SEQ ID NO: 4292 - protein, 9 aa, Homo sapiens
SCLKKLLQR

SEQ ID NO: 4293 - protein, 9 aa, Homo sapiens
KLLQRCFEK

SEQ ID NO: 4294 - protein, 10 aa, Homo sapiens
KKLLQRCFEK

SEQ ID NO: 4295 - protein, 10 aa, Homo sapiens
KSNDPKTEPK

SEQ ID NO: 4296 - protein, 10 aa, Homo sapiens
RCFEKCPWEK

SEQ ID NO: 4297 - protein, 9 aa, Homo sapiens
KCQPSCLKK

SEQ ID NO: 4298 - protein, 10 aa, Homo sapiens
SSCPPQPCTK

SEQ ID NO: 4299 - protein, 10 aa, Homo sapiens
KSNDPKTEPK

SEQ ID NO: 4300 - protein, 9 aa, Homo sapiens
KLLQRCFEK

SEQ ID NO: 4301 - protein, 10 aa, Homo sapiens
RCFEKCPWEK

SEQ ID NO: 4302 - protein, 9 aa, Homo sapiens
SCLKKLLQR

SEQ ID NO: 4303 - protein, 12 aa, Homo sapiens
KLLQRCFEKCPW

SEQ ID NO: 4304 - protein, 9 aa, Homo sapiens
CQPSCLKKL

SEQ ID NO: 4305 - protein, 11 aa, Homo sapiens
LLQRCFEKCPW

SEQ ID NO: 4306 - protein, 9 aa, Homo sapiens
KCPAPPKCL

SEQ ID NO: 4307 - protein, 10 aa, Homo sapiens
KCQPSCLKKL

SEQ ID NO: 4308 - protein, 9 aa, Homo sapiens
SCPPQPCTK

SEQ ID NO: 4309 - protein, 12 aa, Homo sapiens
KSKSNDPKTEPK

SEQ ID NO: 4310 - protein, 10 aa, Homo sapiens
KSNDPKTEPK

SEQ ID NO: 4311 - protein, 8 aa, Homo sapiens
CTKPCPPK

SEQ ID NO: 4312 - protein, 10 aa, Homo sapiens
RCFEKCPWEK

SEQ ID NO: 4313 - protein, 9 aa, Homo sapiens
KCQPSCLKK

SEQ ID NO: 4314 - protein, 10 aa, Homo sapiens
SSCPPQPCTK

SEQ ID NO: 4315 - protein, 10 aa, Homo sapiens
ESKCQPSCLK

SEQ ID NO: 4316 - protein, 8 aa, Homo sapiens
CLKKLLQR

SEQ ID NO: 4317 - protein, 9 aa, Homo sapiens
SCLKKLLQR

SEQ ID NO: 4318 - protein, 10 aa, Homo sapiens
PSCLKKLLQR

SEQ ID NO: 4319 - protein, 9 aa, Homo sapiens
QPSCLKKLL

SEQ ID NO: 4320 - protein, 8 aa, Homo sapiens
CPAPPKCL

SEQ ID NO: 4321 - protein, 9 aa, Homo sapiens
CPHACPPPC

SEQ ID NO: 4322 - protein, 9 aa, Homo sapiens
CPSQSPSSC

SEQ ID NO: 4323 - protein, 10 aa, Homo sapiens
CLKKLLQRCF

SEQ ID NO: 4324 - protein, 9 aa, Homo sapiens
ESKCQPSCL

SEQ ID NO: 4325 - protein, 8 aa, Homo sapiens
CPWEKCPA

SEQ ID NO: 4326 - protein, 8 aa, Homo sapiens
CPAPPKCL

SEQ ID NO: 4327 - protein, 9 aa, Homo sapiens
QPSCLKKLL

SEQ ID NO: 4328 - protein, 8 aa, Homo sapiens
QPSCLKKL

SEQ ID NO: 4329 - protein, 10 aa, Homo sapiens
CESKCQPSCL

SEQ ID NO: 4330 - protein, 9 aa, Homo sapiens
CESKCQPSC

SEQ ID NO: 4331 - protein, 10 aa, Homo sapiens
LQRCFEKCPW

SEQ ID NO: 4332 - protein, 9 aa, Homo sapiens
CQPSCLKKL

SEQ ID NO: 4333 - protein, 9 aa, Homo sapiens
CLKKLLQRC

SEQ ID NO: 4334 - protein, 8 aa, Homo sapiens
CQPSCLKK

SEQ ID NO: 4335 - protein, 10 aa, Homo sapiens
LQRCFEKCPW

SEQ ID NO: 4336 - protein, 10 aa, Homo sapiens
CLKKLLQRCF

SEQ ID NO: 4337 - protein, 9 aa, Homo sapiens
CQPSCLKKL

SEQ ID NO: 4338 - protein, 9 aa, Homo sapiens
KSNDPKTEP

SEQ ID NO: 4339 - protein, 9 aa, Homo sapiens
SSDDKSKSN

SEQ ID NO: 4340 - protein, 9 aa, Homo sapiens
HACPPPCPP

SEQ ID NO: 4341 - protein, 9 aa, Homo sapiens
CQPSCLKKL

SEQ ID NO: 4342 - protein, 9 aa, Homo sapiens
KCPAPPKCL

SEQ ID NO: 4343 - protein, 10 aa, Homo sapiens
CQPSCLKKLL

SEQ ID NO: 4344 - protein, 10 aa, Homo sapiens
KCPSSCPHAC

SEQ ID NO: 4345 - protein, 9 aa, Homo sapiens
CQPSCLKKL

SEQ ID NO: 4346 - protein, 9 aa, Homo sapiens
CPHACPPPC

SEQ ID NO: 4347 - protein, 9 aa, Homo sapiens
CPSQSPSSC

SEQ ID NO: 4348 - protein, 9 aa, Homo sapiens
HACPPPCPP

SEQ ID NO: 4349 - protein, 9 aa, Homo sapiens
KCPAPPKCL

SEQ ID NO: 4350 - protein, 9 aa, Homo sapiens
SSDDKSKSN

SEQ ID NO: 4351 - protein, 9 aa, Homo sapiens
CQPSCLKKL

SEQ ID NO: 4352 - protein, 9 aa, Homo sapiens
CFEKCPWEK

SEQ ID NO: 4353 - protein, 10 aa, Homo sapiens
CQPSCLKKLL

SEQ ID NO: 4354 - protein, 8 aa, Homo sapiens
SNDPKTEP

SEQ ID NO: 4355 - protein, 9 aa, Homo sapiens
KCPAPPKCL

SEQ ID NO: 4356 - protein, 9 aa, Homo sapiens
CQPSCLKKL

SEQ ID NO: 4357 - protein, 9 aa, Homo sapiens
LKKLLQRCF

SEQ ID NO: 4358 - protein, 10 aa, Homo sapiens
CQPSCLKKLL

SEQ ID NO: 4359 - protein, 9 aa, Homo sapiens
KSNDPKTEP

SEQ ID NO: 4360 - protein, 8 aa, Homo sapiens
SNDPKTEP

SEQ ID NO: 4361 - protein, 8 aa, Homo sapiens
KSNDPKTE

SEQ ID NO: 4362 - protein, 9 aa, Homo sapiens
CQPSCLKKL

SEQ ID NO: 4363 - protein, 9 aa, Homo sapiens
LKKLLQRCF

SEQ ID NO: 4364 - protein, 10 aa, Homo sapiens
CQPSCLKKLL

SEQ ID NO: 4365 - protein, 9 aa, Homo sapiens
KCPAPPKCL

SEQ ID NO: 4366 - protein, 9 aa, Homo sapiens
SCPPQPCTK

SEQ ID NO: 4367 - protein, 8 aa, Homo sapiens
SKCQPSCL

SEQ ID NO: 4368 - protein, 9 aa, Homo sapiens
EVDPTSHSY

SEQ ID NO: 4369 - protein, 10 aa, Homo sapiens
LTQNWVQEKY

SEQ ID NO: 4370 - protein, 10 aa, Homo sapiens
ETSKMKVLEY

SEQ ID NO: 4371 - protein, 9 aa, Homo sapiens
IIDLVHLLL

SEQ ID NO: 4372 - protein, 9 aa, Homo sapiens
KIIDLVHLL

SEQ ID NO: 4373 - protein, 9 aa, Homo sapiens
KVLEYIANA

SEQ ID NO: 4374 - protein, 10 aa, Homo sapiens
LLFGIDVKEV

SEQ ID NO: 4375 - protein, 11 aa, Homo sapiens
VMWEVLSIMGV

SEQ ID NO: 4376 - protein, 9 aa, Homo sapiens
VLWGPITQI

SEQ ID NO: 4377 - protein, 9 aa, Homo sapiens
FLFGEPKRL

SEQ ID NO: 4378 - protein, 10 aa, Homo sapiens
ILHDKIIDLV

SEQ ID NO: 4379 - protein, 9 aa, Homo sapiens
VMWEVLSIM

SEQ ID NO: 4380 - protein, 9 aa, Homo sapiens
FLWGPRAHA

SEQ ID NO: 4381 - protein, 9 aa, Homo sapiens
ILHDKIIDL

SEQ ID NO: 4382 - protein, 9 aa, Homo sapiens
GLLIIVLGV

SEQ ID NO: 4383 - protein, 9 aa, Homo sapiens
ALREEGEGV

SEQ ID NO: 4384 - protein, 10 aa, Homo sapiens
FLFGEPKRLL

SEQ ID NO: 4385 - protein, 10 aa, Homo sapiens
IDLVHLLLRK

SEQ ID NO: 4386 - protein, 9 aa, Homo sapiens
LLLRKYRVK

SEQ ID NO: 4387 - protein, 10 aa, Homo sapiens
GLGCSPASIK

SEQ ID NO: 4388 - protein, 11 aa, Homo sapiens
RLLTQNWVQEK

SEQ ID NO: 4389 - protein, 11 aa, Homo sapiens
RKYRVKGLITK

SEQ ID NO: 4390 - protein, 11 aa, Homo sapiens
KIIDLVHLLLR

SEQ ID NO: 4391 - protein, 9 aa, Homo sapiens
SIMGVYAGR

SEQ ID NO: 4392 - protein, 9 aa, Homo sapiens
LTQNWVQEK

SEQ ID NO: 4393 - protein, 10 aa, Homo sapiens
KAEMLGSVIK

SEQ ID NO: 4394 - protein, 9 aa, Homo sapiens
RVIMPLEQR

SEQ ID NO: 4395 - protein, 10 aa, Homo sapiens
VYAGREHFLF

SEQ ID NO: 4396 - protein, 9 aa, Homo sapiens
LWGPITQIF

SEQ ID NO: 4397 - protein, 10 aa, Homo sapiens
VLWGPITQIF

SEQ ID NO: 4398 - protein, 9 aa, Homo sapiens
NYEDYFPEI

SEQ ID NO: 4399 - protein, 9 aa, Homo sapiens
VYAGREHFL

SEQ ID NO: 4400 - protein, 10 aa, Homo sapiens
KYRVKGLITK

SEQ ID NO: 4401 - protein, 9 aa, Homo sapiens
MSKVSTMFS

SEQ ID NO: 4402 - protein, 9 aa, Homo sapiens
RVKGLITKA

SEQ ID NO: 4403 - protein, 8 aa, Homo sapiens
RVKGLITK

SEQ ID NO: 4404 - protein, 9 aa, Homo sapiens
LTQNWVQEK

SEQ ID NO: 4405 - protein, 9 aa, Homo sapiens
SIMGVYAGR

SEQ ID NO: 4406 - protein, 10 aa, Homo sapiens
LSIMGVYAGR

SEQ ID NO: 4407 - protein, 10 aa, Homo sapiens
WVQEKYLVYR

SEQ ID NO: 4408 - protein, 9 aa, Homo sapiens
EYIANANGR

SEQ ID NO: 4409 - protein, 9 aa, Homo sapiens
EDYFPEIFR

SEQ ID NO: 4410 - protein, 10 aa, Homo sapiens
RPADLTRVIM

SEQ ID NO: 4411 - protein, 9 aa, Homo sapiens
RPADLTRVI

SEQ ID NO: 4412 - protein, 12 aa, Homo sapiens
RPADLTRVIMPL

SEQ ID NO: 4413 - protein, 9 aa, Homo sapiens
APYGPQLQW

SEQ ID NO: 4414 - protein, 9 aa, Homo sapiens
SPSPPQSPQ

SEQ ID NO: 4415 - protein, 10 aa, Homo sapiens
LLRKYRVKGL

SEQ ID NO: 4416 - protein, 9 aa, Homo sapiens
HLLLRKYRV

SEQ ID NO: 4417 - protein, 9 aa, Homo sapiens
LRKYRVKGL

SEQ ID NO: 4418 - protein, 9 aa, Homo sapiens
FPTVRPADL

SEQ ID NO: 4419 - protein, 9 aa, Homo sapiens
ILHDKIIDL

SEQ ID NO: 4420 - protein, 8 aa, Homo sapiens
SGLLIIVL

SEQ ID NO: 4421 - protein, 9 aa, Homo sapiens
MQLLFGIDV

SEQ ID NO: 4422 - protein, 9 aa, Homo sapiens
WEVLSIMGV

SEQ ID NO: 4423 - protein, 9 aa, Homo sapiens
REASVCMQL

SEQ ID NO: 4424 - protein, 9 aa, Homo sapiens
VLWGPITQI

SEQ ID NO: 4425 - protein, 9 aa, Homo sapiens
SQDILHDKI

SEQ ID NO: 4426 - protein, 9 aa, Homo sapiens
GLLIIVLGV

SEQ ID NO: 4427 - protein, 9 aa, Homo sapiens
FQSTERAPY

SEQ ID NO: 4428 - protein, 9 aa, Homo sapiens
HSYVLVTSL

SEQ ID NO: 4429 - protein, 9 aa, Homo sapiens
LVTSLNLSY

SEQ ID NO: 4430 - protein, 10 aa, Homo sapiens
FSPTAMDAIF

SEQ ID NO: 4431 - protein, 9 aa, Homo sapiens
TSKMKVLEY

SEQ ID NO: 4432 - protein, 9 aa, Homo sapiens
ILHDKIIDL

SEQ ID NO: 4433 - protein, 9 aa, Homo sapiens
FSPTAMDAI

SEQ ID NO: 4434 - protein, 9 aa, Homo sapiens
SMPKSGLLI

SEQ ID NO: 4435 - protein, 9 aa, Homo sapiens
AMDAIFGSL

SEQ ID NO: 4436 - protein, 9 aa, Homo sapiens
RDPTSYPSL

SEQ ID NO: 4437 - protein, 8 aa, Homo sapiens
RAPYGPQL

SEQ ID NO: 4438 - protein, 9 aa, Homo sapiens
YVLVTSLNL

SEQ ID NO: 4439 - protein, 9 aa, Homo sapiens
HSYVLVTSL

SEQ ID NO: 4440 - protein, 9 aa, Homo sapiens
EAAFFSSTL

SEQ ID NO: 4441 - protein, 10 aa, Homo sapiens
TAMDAIFGSL

SEQ ID NO: 4442 - protein, 8 aa, Homo sapiens
AAFFSSTL

SEQ ID NO: 4443 - protein, 9 aa, Homo sapiens
YEDYFPEIF

SEQ ID NO: 4444 - protein, 9 aa, Homo sapiens
GTDPACYEF

SEQ ID NO: 4445 - protein, 9 aa, Homo sapiens
AMDAIFGSL

SEQ ID NO: 4446 - protein, 9 aa, Homo sapiens
IIDLVHLLL

SEQ ID NO: 4447 - protein, 9 aa, Homo sapiens
IFREASVCM

SEQ ID NO: 4448 - protein, 10 aa, Homo sapiens
FREASVCMQL

SEQ ID NO: 4449 - protein, 9 aa, Homo sapiens
ERAPYGPQL

SEQ ID NO: 4450 - protein, 9 aa, Homo sapiens
LRKYRVKGL

SEQ ID NO: 4451 - protein, 9 aa, Homo sapiens
KSGLLIIVL

SEQ ID NO: 4452 - protein, 9 aa, Homo sapiens
RITGGEQVL

SEQ ID NO: 4453 - protein, 9 aa, Homo sapiens
VYAGREHFL

SEQ ID NO: 4454 - protein, 10 aa, Homo sapiens
FREASVCMQL

SEQ ID NO: 4455 - protein, 9 aa, Homo sapiens
IFREASVCM

SEQ ID NO: 4456 - protein, 9 aa, Homo sapiens
ERAPYGPQL

SEQ ID NO: 4457 - protein, 8 aa, Homo sapiens
SYVLVTSL

SEQ ID NO: 4458 - protein, 10 aa, Homo sapiens
LTQDLVQENY

SEQ ID NO: 4459 - protein, 9 aa, Homo sapiens
LVQENYLEY

SEQ ID NO: 4460 - protein, 11 aa, Homo sapiens
LLTQDLVQENY

SEQ ID NO: 4461 - protein, 11 aa, Homo sapiens
VVEVVRIGHLY

SEQ ID NO: 4462 - protein, 12 aa, Homo sapiens
MAELVHFLLLKY

SEQ ID NO: 4463 - protein, 9 aa, Homo sapiens
KMAELVHFL

SEQ ID NO: 4464 - protein, 10 aa, Homo sapiens
KMAELVHFLL

SEQ ID NO: 4465 - protein, 9 aa, Homo sapiens
FLWGPRALV

SEQ ID NO: 4466 - protein, 10 aa, Homo sapiens
RKMAELVHFL

SEQ ID NO: 4467 - protein, 10 aa, Homo sapiens
TLVEVTLREV

SEQ ID NO: 4468 - protein, 10 aa, Homo sapiens
YLQLVFGIEV

SEQ ID NO: 4469 - protein, 11 aa, Homo sapiens
KMAELVHFLLL

SEQ ID NO: 4470 - protein, 9 aa, Homo sapiens
KIWEELSVL

SEQ ID NO: 4471 - protein, 12 aa, Homo sapiens
LSRKMAELVHFL

SEQ ID NO: 4472 - protein, 9 aa, Homo sapiens
GLLGDNQIV

SEQ ID NO: 4473 - protein, 10 aa, Homo sapiens
ALVETSYVKV

SEQ ID NO: 4474 - protein, 9 aa, Homo sapiens
GLLIIVLAI

SEQ ID NO: 4475 - protein, 9 aa, Homo sapiens
FGIEVVEVV

SEQ ID NO: 4476 - protein, 12 aa, Homo sapiens
KMAELVHFLLLK

SEQ ID NO: 4477 - protein, 10 aa, Homo sapiens
AELVHFLLLK

SEQ ID NO: 4478 - protein, 10 aa, Homo sapiens
TSFQVALSRK

SEQ ID NO: 4479 - protein, 10 aa, Homo sapiens
RALVETSYVK

SEQ ID NO: 4480 - protein, 11 aa, Homo sapiens
GLLGDNQIVPK

SEQ ID NO: 4481 - protein, 10 aa, Homo sapiens
LLGDNQIVPK

SEQ ID NO: 4482 - protein, 9 aa, Homo sapiens
STLPTTINY

SEQ ID NO: 4483 - protein, 10 aa, Homo sapiens
TSFQVALSRK

SEQ ID NO: 4484 - protein, 9 aa, Homo sapiens
STLPTTINY

SEQ ID NO: 4485 - protein, 9 aa, Homo sapiens
ALVETSYVK

SEQ ID NO: 4486 - protein, 10 aa, Homo sapiens
AELVHFLLLK

SEQ ID NO: 4487 - protein, 9 aa, Homo sapiens
STLVEVTLR

SEQ ID NO: 4488 - protein, 9 aa, Homo sapiens
TSFQVALSR

SEQ ID NO: 4489 - protein, 10 aa, Homo sapiens
SYPPLHEWAF

SEQ ID NO: 4490 - protein, 9 aa, Homo sapiens
SYVKVLHHL

SEQ ID NO: 4491 - protein, 10 aa, Homo sapiens
SYVKVLHHLL

SEQ ID NO: 4492 - protein, 9 aa, Homo sapiens
RAREPFTKA

SEQ ID NO: 4493 - protein, 10 aa, Homo sapiens
KYRAREPFTK

SEQ ID NO: 4494 - protein, 9 aa, Homo sapiens
VVRIGHLYI

SEQ ID NO: 4495 - protein, 9 aa, Homo sapiens
STLPTTINY

SEQ ID NO: 4496 - protein, 9 aa, Homo sapiens
SVFAHPRKL

SEQ ID NO: 4497 - protein, 10 aa, Homo sapiens
HFLLLKYRAR

SEQ ID NO: 4498 - protein, 9 aa, Homo sapiens
DFFPVIFSK

SEQ ID NO: 4499 - protein, 10 aa, Homo sapiens
LVHFLLLKYR

SEQ ID NO: 4500 - protein, 9 aa, Homo sapiens
STLVEVTLR

SEQ ID NO: 4501 - protein, 9 aa, Homo sapiens
TSFQVALSR

SEQ ID NO: 4502 - protein, 10 aa, Homo sapiens
HPRKLLTQDL

SEQ ID NO: 4503 - protein, 9 aa, Homo sapiens
GPHISYPPL

SEQ ID NO: 4504 - protein, 9 aa, Homo sapiens
LPTTINYTL

SEQ ID NO: 4505 - protein, 8 aa, Homo sapiens
SPQGASTL

SEQ ID NO: 4506 - protein, 9 aa, Homo sapiens
SPSPPHSPQ

SEQ ID NO: 4507 - protein, 10 aa, Homo sapiens
LLKYRAREPF

SEQ ID NO: 4508 - protein, 9 aa, Homo sapiens
YVKVLHHLL

SEQ ID NO: 4509 - protein, 12 aa, Homo sapiens
FLLLKYRAREPF

SEQ ID NO: 4510 - protein, 9 aa, Homo sapiens
EPFTKAEML

SEQ ID NO: 4511 - protein, 8 aa, Homo sapiens
EEKIWEEL

SEQ ID NO: 4512 - protein, 8 aa, Homo sapiens
YVKVLHHL

SEQ ID NO: 4513 - protein, 10 aa, Homo sapiens
SEYLQLVFGI

SEQ ID NO: 4514 - protein, 9 aa, Homo sapiens
RNFQDFFPV

SEQ ID NO: 4515 - protein, 11 aa, Homo sapiens
YEFLWGPRALV

SEQ ID NO: 4516 - protein, 9 aa, Homo sapiens
GLLIIVLAI

SEQ ID NO: 4517 - protein, 9 aa, Homo sapiens
KVLHHLLKI

SEQ ID NO: 4518 - protein, 9 aa, Homo sapiens
GLLGDNQIV

SEQ ID NO: 4519 - protein, 9 aa, Homo sapiens
LVQENYLEY

SEQ ID NO: 4520 - protein, 9 aa, Homo sapiens
SVIRNFQDF

SEQ ID NO: 4521 - protein, 9 aa, Homo sapiens
FQVALSRKM

SEQ ID NO: 4522 - protein, 9 aa, Homo sapiens
ISYPPLHEW

SEQ ID NO: 4523 - protein, 9 aa, Homo sapiens
VIFSKASEY

SEQ ID NO: 4524 - protein, 9 aa, Homo sapiens
ISGGPHISY

SEQ ID NO: 4525 - protein, 9 aa, Homo sapiens
KMAELVHFL

SEQ ID NO: 4526 - protein, 9 aa, Homo sapiens
HSPQGASTL

SEQ ID NO: 4527 - protein, 9 aa, Homo sapiens
IVPKTGLLI

SEQ ID NO: 4528 - protein, 10 aa, Homo sapiens
TLPTTINYTL

SEQ ID NO: 4529 - protein, 9 aa, Homo sapiens
EGPSTFPDL

SEQ ID NO: 4530 - protein, 9 aa, Homo sapiens
SVFAHPRKL

SEQ ID NO: 4531 - protein, 9 aa, Homo sapiens
FQVALSRKM

SEQ ID NO: 4532 - protein, 9 aa, Homo sapiens
HSPQGASTL

SEQ ID NO: 4533 - protein, 9 aa, Homo sapiens
ISYPPLHEW

SEQ ID NO: 4534 - protein, 8 aa, Homo sapiens
FAHPRKLL

SEQ ID NO: 4535 - protein, 8 aa, Homo sapiens
KASEYLQL

SEQ ID NO: 4536 - protein, 9 aa, Homo sapiens
FQDFFPVIF

SEQ ID NO: 4537 - protein, 9 aa, Homo sapiens
IFSKASEYL

SEQ ID NO: 4538 - protein, 9 aa, Homo sapiens
TFPDLETSF

SEQ ID NO: 4539 - protein, 9 aa, Homo sapiens
KMAELVHFL

SEQ ID NO: 4540 - protein, 8 aa, Homo sapiens
IWEELSVL

SEQ ID NO: 4541 - protein, 9 aa, Homo sapiens
VRIGHLYIL

SEQ ID NO: 4542 - protein, 9 aa, Homo sapiens
SVFAHPRKL

SEQ ID NO: 4543 - protein, 10 aa, Homo sapiens
SVFAHPRKLL

SEQ ID NO: 4544 - protein, 9 aa, Homo sapiens
KMAELVHFL

SEQ ID NO: 4545 - protein, 9 aa, Homo sapiens
KIWEELSVL

SEQ ID NO: 4546 - protein, 9 aa, Homo sapiens
SGGPHISYP

SEQ ID NO: 4547 - protein, 9 aa, Homo sapiens
VRIGHLYIL

SEQ ID NO: 4548 - protein, 9 aa, Homo sapiens
SVFAHPRKL

SEQ ID NO: 4549 - protein, 9 aa, Homo sapiens
SYVKVLHHL

SEQ ID NO: 4550 - protein, 10 aa, Homo sapiens
SYPPLHEWAF

SEQ ID NO: 4551 - protein, 10 aa, Homo sapiens
LMQDLVQENY

SEQ ID NO: 4552 - protein, 9 aa, Homo sapiens
MQDLVQENY

SEQ ID NO: 4553 - protein, 10 aa, Homo sapiens
ASSFSTTINY

SEQ ID NO: 4554 - protein, 11 aa, Homo sapiens
VVEVVPISHLY

SEQ ID NO: 4555 - protein, 12 aa, Homo sapiens
MVELVHFLLLKY

SEQ ID NO: 4556 - protein, 9 aa, Homo sapiens
KMVELVHFL

SEQ ID NO: 4557 - protein, 10 aa, Homo sapiens
KMVELVHFLL

SEQ ID NO: 4558 - protein, 10 aa, Homo sapiens
RKMVELVHFL

SEQ ID NO: 4559 - protein, 9 aa, Homo sapiens
KIWEELSML

SEQ ID NO: 4560 - protein, 9 aa, Homo sapiens
FLWGPRALI

SEQ ID NO: 4561 - protein, 10 aa, Homo sapiens
ALIETSYVKV

SEQ ID NO: 4562 - protein, 10 aa, Homo sapiens
TLVEVTLGEV

SEQ ID NO: 4563 - protein, 11 aa, Homo sapiens
KMVELVHFLLL

SEQ ID NO: 4564 - protein, 12 aa, Homo sapiens
LLMQDLVQENYL

SEQ ID NO: 4565 - protein, 8 aa, Homo sapiens
ALIETSYV

SEQ ID NO: 4566 - protein, 8 aa, Homo sapiens
GLLGDNQV

SEQ ID NO: 4567 - protein, 9 aa, Homo sapiens
GLLGDNQVM

SEQ ID NO: 4568 - protein, 8 aa, Homo sapiens
TLGEVPAA

SEQ ID NO: 4569 - protein, 10 aa, Homo sapiens
VELVHFLLLK

SEQ ID NO: 4570 - protein, 12 aa, Homo sapiens
KMVELVHFLLLK

SEQ ID NO: 4571 - protein, 10 aa, Homo sapiens
LLGDNQVMPK

SEQ ID NO: 4572 - protein, 11 aa, Homo sapiens
GLLGDNQVMPK

SEQ ID NO: 4573 - protein, 9 aa, Homo sapiens
SSFSTTINY

SEQ ID NO: 4574 - protein, 9 aa, Homo sapiens
TTINYTLWR

SEQ ID NO: 4575 - protein, 10 aa, Homo sapiens
STTINYTLWR

SEQ ID NO: 4576 - protein, 9 aa, Homo sapiens
ALIETSYVK

SEQ ID NO: 4577 - protein, 9 aa, Homo sapiens
SSFSTTINY

SEQ ID NO: 4578 - protein, 10 aa, Homo sapiens
SYVKVLHHTL

SEQ ID NO: 4579 - protein, 11 aa, Homo sapiens
IWEELSMLEVF

SEQ ID NO: 4580 - protein, 12 aa, Homo sapiens
SYVKVLHHTLKI

SEQ ID NO: 4581 - protein, 9 aa, Homo sapiens
MFPDLESEF

SEQ ID NO: 4582 - protein, 9 aa, Homo sapiens
VMPKTGLLI

SEQ ID NO: 4583 - protein, 10 aa, Homo sapiens
KYRAREPVTK

SEQ ID NO: 4584 - protein, 9 aa, Homo sapiens
RAREPVTKA

SEQ ID NO: 4585 - protein, 8 aa, Homo sapiens
RAREPVTK

SEQ ID NO: 4586 - protein, 9 aa, Homo sapiens
SSFSTTINY

SEQ ID NO: 4587 - protein, 9 aa, Homo sapiens
TTINYTLWR

SEQ ID NO: 4588 - protein, 10 aa, Homo sapiens
HISYPPLHER

SEQ ID NO: 4589 - protein, 9 aa, Homo sapiens
SMLEVFEGR

SEQ ID NO: 4590 - protein, 9 aa, Homo sapiens
ISYPPLHER

SEQ ID NO: 4591 - protein, 8 aa, Homo sapiens
EFQAAISR

SEQ ID NO: 4592 - protein, 10 aa, Homo sapiens
HPRKLLMQDL

SEQ ID NO: 4593 - protein, 9 aa, Homo sapiens
VPISHLYIL

SEQ ID NO: 4594 - protein, 9 aa, Homo sapiens
MPKTGLLII

SEQ ID NO: 4595 - protein, 8 aa, Homo sapiens
SPQGASSF

SEQ ID NO: 4596 - protein, 9 aa, Homo sapiens
YPPLHERAL

SEQ ID NO: 4597 - protein, 9 aa, Homo sapiens
YVKVLHHTL

SEQ ID NO: 4598 - protein, 10 aa, Homo sapiens
LLKYRAREPV

SEQ ID NO: 4599 - protein, 9 aa, Homo sapiens
FAHPRKLLM

SEQ ID NO: 4600 - protein, 9 aa, Homo sapiens
AISRKMVEL

SEQ ID NO: 4601 - protein, 11 aa, Homo sapiens
YEFLWGPRALI

SEQ ID NO: 4602 - protein, 12 aa, Homo sapiens
CYEFLWGPRALI

SEQ ID NO: 4603 - protein, 9 aa, Homo sapiens
IEVVEVVPI

SEQ ID NO: 4604 - protein, 9 aa, Homo sapiens
KVLHHTLKI

SEQ ID NO: 4605 - protein, 9 aa, Homo sapiens
RQSDEGSSN

SEQ ID NO: 4606 - protein, 8 aa, Homo sapiens
VLHHTLKI

SEQ ID NO: 4607 - protein, 9 aa, Homo sapiens
FAHPRKLLM

SEQ ID NO: 4608 - protein, 9 aa, Homo sapiens
FQAAISRKM

SEQ ID NO: 4609 - protein, 9 aa, Homo sapiens
SSFSTTINY

SEQ ID NO: 4610 - protein, 9 aa, Homo sapiens
ISYPPLHER

SEQ ID NO: 4611 - protein, 9 aa, Homo sapiens
IGGEPHISY

SEQ ID NO: 4612 - protein, 9 aa, Homo sapiens
FSTTINYTL

SEQ ID NO: 4613 - protein, 9 aa, Homo sapiens
FAHPRKLLM

SEQ ID NO: 4614 - protein, 9 aa, Homo sapiens
VMPKTGLLI

SEQ ID NO: 4615 - protein, 9 aa, Homo sapiens
HSPQGASSF

SEQ ID NO: 4616 - protein, 9 aa, Homo sapiens
YPPLHERAL

SEQ ID NO: 4617 - protein, 9 aa, Homo sapiens
VVPISHLYI

SEQ ID NO: 4618 - protein, 9 aa, Homo sapiens
FAHPRKLLM

SEQ ID NO: 4619 - protein, 9 aa, Homo sapiens
FSTTINYTL

SEQ ID NO: 4620 - protein, 9 aa, Homo sapiens
FQAAISRKM

SEQ ID NO: 4621 - protein, 10 aa, Homo sapiens
AAISRKMVEL

SEQ ID NO: 4622 - protein, 9 aa, Homo sapiens
MFPDLESEF

SEQ ID NO: 4623 - protein, 9 aa, Homo sapiens
CQDFFPVIF

SEQ ID NO: 4624 - protein, 9 aa, Homo sapiens
FAHPRKLLM

SEQ ID NO: 4625 - protein, 8 aa, Homo sapiens
IWEELSML

SEQ ID NO: 4626 - protein, 9 aa, Homo sapiens
FAHPRKLLM

SEQ ID NO: 4627 - protein, 9 aa, Homo sapiens
FQAAISRKM

SEQ ID NO: 4628 - protein, 9 aa, Homo sapiens
FSTTINYTL

SEQ ID NO: 4629 - protein, 9 aa, Homo sapiens
SSFSTTINY

SEQ ID NO: 4630 - protein, 8 aa, Homo sapiens
ARGEALGL

SEQ ID NO: 4631 - protein, 9 aa, Homo sapiens
LEVFEGRED

SEQ ID NO: 4632 - protein, 9 aa, Homo sapiens
FAHPRKLLM

SEQ ID NO: 4633 - protein, 9 aa, Homo sapiens
MFPDLESEF

SEQ ID NO: 4634 - protein, 9 aa, Homo sapiens
FQAAISRKM

SEQ ID NO: 4635 - protein, 10 aa, Homo sapiens
SYPPLHERAL

SEQ ID NO: 4636 - protein, 8 aa, Homo sapiens
ARGEALGL

SEQ ID NO: 4637 - protein, 8 aa, Homo sapiens
SYPPLHER

SEQ ID NO: 4638 - protein, 9 aa, Homo sapiens
EVDPASNTY

SEQ ID NO: 4639 - protein, 11 aa, Homo sapiens
YTLVTCLGLSY

SEQ ID NO: 4640 - protein, 10 aa, Homo sapiens
KEVDPASNTY

SEQ ID NO: 4641 - protein, 8 aa, Homo sapiens
VTCLGLSY

SEQ ID NO: 4642 - protein, 9 aa, Homo sapiens
MLERVIKNY

SEQ ID NO: 4643 - protein, 9 aa, Homo sapiens
KVLEHVVRV

SEQ ID NO: 4644 - protein, 9 aa, Homo sapiens
ALLEEEEGV

SEQ ID NO: 4645 - protein, 9 aa, Homo sapiens
FLWGPRALA

SEQ ID NO: 4646 - protein, 10 aa, Homo sapiens
MIFGIDVKEV

SEQ ID NO: 4647 - protein, 10 aa, Homo sapiens
ALAETSYVKV

SEQ ID NO: 4648 - protein, 9 aa, Homo sapiens
KVDELAHFL

SEQ ID NO: 4649 - protein, 11 aa, Homo sapiens
FLWGPRALAET

SEQ ID NO: 4650 - protein, 8 aa, Homo sapiens
ALAETSYV

SEQ ID NO: 4651 - protein, 10 aa, Homo sapiens
SLKMIFGIDV

SEQ ID NO: 4652 - protein, 9 aa, Homo sapiens
ALSNKVDEL

SEQ ID NO: 4653 - protein, 10 aa, Homo sapiens
GVYDGREHTV

SEQ ID NO: 4654 - protein, 10 aa, Homo sapiens
PLVPGTLEEV

SEQ ID NO: 4655 - protein, 8 aa, Homo sapiens
FLWGPRAL

SEQ ID NO: 4656 - protein, 10 aa, Homo sapiens
SLFREALSNK

SEQ ID NO: 4657 - protein, 12 aa, Homo sapiens
KVDELAHFLLRK

SEQ ID NO: 4658 - protein, 10 aa, Homo sapiens
MLERVIKNYK

SEQ ID NO: 4659 - protein, 9 aa, Homo sapiens
RCFPVIFGK

SEQ ID NO: 4660 - protein, 11 aa, Homo sapiens
GLLGNNQIFPK

SEQ ID NO: 4661 - protein, 9 aa, Homo sapiens
ELAHFLLRK

SEQ ID NO: 4662 - protein, 9 aa, Homo sapiens
TTISFTCWR

SEQ ID NO: 4663 - protein, 10 aa, Homo sapiens
SLFREALSNK

SEQ ID NO: 4664 - protein, 9 aa, Homo sapiens
ALAETSYVK

SEQ ID NO: 4665 - protein, 9 aa, Homo sapiens
RCFPVIFGK

SEQ ID NO: 4666 - protein, 9 aa, Homo sapiens
GVMGVYDGR

SEQ ID NO: 4667 - protein, 9 aa, Homo sapiens
NYKRCFPVI

SEQ ID NO: 4668 - protein, 10 aa, Homo sapiens
NYKRCFPVIF

SEQ ID NO: 4669 - protein, 9 aa, Homo sapiens
SYVKVLEHV

SEQ ID NO: 4670 - protein, 9 aa, Homo sapiens
VYGEPRKLL

SEQ ID NO: 4671 - protein, 9 aa, Homo sapiens
IFPKTGLLI

SEQ ID NO: 4672 - protein, 9 aa, Homo sapiens
RVRIAYPSL

SEQ ID NO: 4673 - protein, 10 aa, Homo sapiens
KYRAKELVTK

SEQ ID NO: 4674 - protein, 12 aa, Homo sapiens
RVRIAYPSLREA

SEQ ID NO: 4675 - protein, 9 aa, Homo sapiens
RCFPVIFGK

SEQ ID NO: 4676 - protein, 9 aa, Homo sapiens
KVLEHVVRV

SEQ ID NO: 4677 - protein, 9 aa, Homo sapiens
TTISFTCWR

SEQ ID NO: 4678 - protein, 10 aa, Homo sapiens
LAHFLLRKYR

SEQ ID NO: 4679 - protein, 10 aa, Homo sapiens
PTTISFTCWR

SEQ ID NO: 4680 - protein, 8 aa, Homo sapiens
ELAHFLLR

SEQ ID NO: 4681 - protein, 9 aa, Homo sapiens
DELAHFLLR

SEQ ID NO: 4682 - protein, 9 aa, Homo sapiens
YPSLREAAL

SEQ ID NO: 4683 - protein, 9 aa, Homo sapiens
RVRIAYPSL

SEQ ID NO: 4684 - protein, 10 aa, Homo sapiens
YPSLREAALL

SEQ ID NO: 4685 - protein, 8 aa, Homo sapiens
SPQGASAL

SEQ ID NO: 4686 - protein, 8 aa, Homo sapiens
SPLVPGTL

SEQ ID NO: 4687 - protein, 11 aa, Homo sapiens
FLLRKYRAKEL

SEQ ID NO: 4688 - protein, 10 aa, Homo sapiens
LLRKYRAKEL

SEQ ID NO: 4689 - protein, 9 aa, Homo sapiens
YPSLREAAL

SEQ ID NO: 4690 - protein, 9 aa, Homo sapiens
ELVTKAEML

SEQ ID NO: 4691 - protein, 8 aa, Homo sapiens
TGLLIIVL

SEQ ID NO: 4692 - protein, 8 aa, Homo sapiens
QIFPKTGL

SEQ ID NO: 4693 - protein, 10 aa, Homo sapiens
SESLKMIFGI

SEQ ID NO: 4694 - protein, 10 aa, Homo sapiens
YEFLWGPRAL

SEQ ID NO: 4695 - protein, 11 aa, Homo sapiens
YEFLWGPRALA

SEQ ID NO: 4696 - protein, 10 aa, Homo sapiens
GVYDGREHTV

SEQ ID NO: 4697 - protein, 9 aa, Homo sapiens
KVLEHVVRV

SEQ ID NO: 4698 - protein, 9 aa, Homo sapiens
ALLEEEEGV

SEQ ID NO: 4699 - protein, 9 aa, Homo sapiens
SALPTTISF

SEQ ID NO: 4700 - protein, 9 aa, Homo sapiens
AAVSSSSPL

SEQ ID NO: 4701 - protein, 9 aa, Homo sapiens
LVTCLGLSY

SEQ ID NO: 4702 - protein, 9 aa, Homo sapiens
VIKNYKRCF

SEQ ID NO: 4703 - protein, 9 aa, Homo sapiens
TSYVKVLEH

SEQ ID NO: 4704 - protein, 9 aa, Homo sapiens
KVDELAHFL

SEQ ID NO: 4705 - protein, 9 aa, Homo sapiens
SSPLVPGTL

SEQ ID NO: 4706 - protein, 9 aa, Homo sapiens
SALPTTISF

SEQ ID NO: 4707 - protein, 9 aa, Homo sapiens
QSPQGASAL

SEQ ID NO: 4708 - protein, 8 aa, Homo sapiens
TSPDAESL

SEQ ID NO: 4709 - protein, 9 aa, Homo sapiens
AAVSSSSPL

SEQ ID NO: 4710 - protein, 9 aa, Homo sapiens
SALPTTISF

SEQ ID NO: 4711 - protein, 9 aa, Homo sapiens
RALAETSYV

SEQ ID NO: 4712 - protein, 8 aa, Homo sapiens
FLWGPRAL

SEQ ID NO: 4713 - protein, 9 aa, Homo sapiens
KVDELAHFL

SEQ ID NO: 4714 - protein, 9 aa, Homo sapiens
IFPKTGLLI

SEQ ID NO: 4715 - protein, 9 aa, Homo sapiens
VYDGREHTV

SEQ ID NO: 4716 - protein, 8 aa, Homo sapiens
KVDELAHF

SEQ ID NO: 4717 - protein, 9 aa, Homo sapiens
LRKYRAKEL

SEQ ID NO: 4718 - protein, 9 aa, Homo sapiens
VRVNARVRI

SEQ ID NO: 4719 - protein, 9 aa, Homo sapiens
FREALSNKV

SEQ ID NO: 4720 - protein, 9 aa, Homo sapiens
KTGLLIIVL

SEQ ID NO: 4721 - protein, 9 aa, Homo sapiens
RCFPVIFGK

SEQ ID NO: 4722 - protein, 9 aa, Homo sapiens
TVYGEPRKL

SEQ ID NO: 4723 - protein, 9 aa, Homo sapiens
YKRCFPVIF

SEQ ID NO: 4724 - protein, 9 aa, Homo sapiens
LRKYRAKEL

SEQ ID NO: 4725 - protein, 9 aa, Homo sapiens
VRVNARVRI

SEQ ID NO: 4726 - protein, 9 aa, Homo sapiens
IFPKTGLLI

SEQ ID NO: 4727 - protein, 8 aa, Homo sapiens
VYGEPRKL

SEQ ID NO: 4728 - protein, 8 aa, Homo sapiens
VRIAYPSL

SEQ ID NO: 4729 - protein, 9 aa, Homo sapiens
ASSASSTLY

SEQ ID NO: 4730 - protein, 9 aa, Homo sapiens
LVEFLLLKY

SEQ ID NO: 4731 - protein, 10 aa, Homo sapiens
EASSASSTLY

SEQ ID NO: 4732 - protein, 12 aa, Homo sapiens
VAELVEFLLLKY

SEQ ID NO: 4733 - protein, 9 aa, Homo sapiens
FLAKLNNTV

SEQ ID NO: 4734 - protein, 9 aa, Homo sapiens
VIWEVLNAV

SEQ ID NO: 4735 - protein, 10 aa, Homo sapiens
LLFGLALIEV

SEQ ID NO: 4736 - protein, 8 aa, Homo sapiens
FMELLFGL

SEQ ID NO: 4737 - protein, 12 aa, Homo sapiens
FLLLKYEAEEPV

SEQ ID NO: 4738 - protein, 10 aa, Homo sapiens
YTLDEKVAEL

SEQ ID NO: 4739 - protein, 9 aa, Homo sapiens
VMASESLSV

SEQ ID NO: 4740 - protein, 9 aa, Homo sapiens
KVLEFLAKL

SEQ ID NO: 4741 - protein, 9 aa, Homo sapiens
KVAELVEFL

SEQ ID NO: 4742 - protein, 9 aa, Homo sapiens
TLDEKVAEL

SEQ ID NO: 4743 - protein, 9 aa, Homo sapiens
SLLIIILSV

SEQ ID NO: 4744 - protein, 9 aa, Homo sapiens
ALKDVEERV

SEQ ID NO: 4745 - protein, 10 aa, Homo sapiens
TLDEKVAELV

SEQ ID NO: 4746 - protein, 10 aa, Homo sapiens
ILGGPEEEEV

SEQ ID NO: 4747 - protein, 9 aa, Homo sapiens
MLMIVIKYK

SEQ ID NO: 4748 - protein, 10 aa, Homo sapiens
SSFTYTLDEK

SEQ ID NO: 4749 - protein, 10 aa, Homo sapiens
EMLMIVIKYK

SEQ ID NO: 4750 - protein, 9 aa, Homo sapiens
KDYFPVILK

SEQ ID NO: 4751 - protein, 9 aa, Homo sapiens
IILSVIFIK

SEQ ID NO: 4752 - protein, 10 aa, Homo sapiens
SSFTYTLDEK

SEQ ID NO: 4753 - protein, 10 aa, Homo sapiens
VPSSFPSWYK

SEQ ID NO: 4754 - protein, 9 aa, Homo sapiens
IILSVIFIK

SEQ ID NO: 4755 - protein, 11 aa, Homo sapiens
SSFSEESSSQK

SEQ ID NO: 4756 - protein, 10 aa, Homo sapiens
LYLVFSPSSF

SEQ ID NO: 4757 - protein, 9 aa, Homo sapiens
KYKDYFPVI

SEQ ID NO: 4758 - protein, 10 aa, Homo sapiens
KYKDYFPVIL

SEQ ID NO: 4759 - protein, 9 aa, Homo sapiens
VYGEPRELL

SEQ ID NO: 4760 - protein, 9 aa, Homo sapiens
RAHSESIKK

SEQ ID NO: 4761 - protein, 9 aa, Homo sapiens
KYKDYFPVI

SEQ ID NO: 4762 - protein, 11 aa, Homo sapiens
KYKDYFPVILK

SEQ ID NO: 4763 - protein, 9 aa, Homo sapiens
KDYFPVILK

SEQ ID NO: 4764 - protein, 9 aa, Homo sapiens
NAVGVYAGR

SEQ ID NO: 4765 - protein, 9 aa, Homo sapiens
DYFPVILKR

SEQ ID NO: 4766 - protein, 10 aa, Homo sapiens
WVQGHYLEYR

SEQ ID NO: 4767 - protein, 11 aa, Homo sapiens
DYFPVILKRAR

SEQ ID NO: 4768 - protein, 9 aa, Homo sapiens
GPRAHSESI

SEQ ID NO: 4769 - protein, 9 aa, Homo sapiens
FPSWYKDAL

SEQ ID NO: 4770 - protein, 10 aa, Homo sapiens
WGPRAHSESI

SEQ ID NO: 4771 - protein, 11 aa, Homo sapiens
SPSSFSTSSSL

SEQ ID NO: 4772 - protein, 9 aa, Homo sapiens
VPSGVIPNL

SEQ ID NO: 4773 - protein, 9 aa, Homo sapiens
MPPVPGVPF

SEQ ID NO: 4774 - protein, 9 aa, Homo sapiens
SIKKKVLEF

SEQ ID NO: 4775 - protein, 10 aa, Homo sapiens
LKRAREFMEL

SEQ ID NO: 4776 - protein, 10 aa, Homo sapiens
SIKKKVLEFL

SEQ ID NO: 4777 - protein, 8 aa, Homo sapiens
ESIKKKVL

SEQ ID NO: 4778 - protein, 9 aa, Homo sapiens
TLDEKVAEL

SEQ ID NO: 4779 - protein, 10 aa, Homo sapiens
MELLFGLALI

SEQ ID NO: 4780 - protein, 10 aa, Homo sapiens
REFMELLFGL

SEQ ID NO: 4781 - protein, 10 aa, Homo sapiens
MPENSLLIII

SEQ ID NO: 4782 - protein, 9 aa, Homo sapiens
SLLIIILSV

SEQ ID NO: 4783 - protein, 9 aa, Homo sapiens
ALKDVEERV

SEQ ID NO: 4784 - protein, 9 aa, Homo sapiens
ASEEVIWEV

SEQ ID NO: 4785 - protein, 9 aa, Homo sapiens
MASESLSVM

SEQ ID NO: 4786 - protein, 9 aa, Homo sapiens
YLVFSPSSF

SEQ ID NO: 4787 - protein, 9 aa, Homo sapiens
FVYGEPREL

SEQ ID NO: 4788 - protein, 9 aa, Homo sapiens
FSTSSSLIL

SEQ ID NO: 4789 - protein, 9 aa, Homo sapiens
HSSPPYYEF

SEQ ID NO: 4790 - protein, 9 aa, Homo sapiens
SIKKKVLEF

SEQ ID NO: 4791 - protein, 9 aa, Homo sapiens
SVMSSNVSF

SEQ ID NO: 4792 - protein, 9 aa, Homo sapiens
FSTSSSLIL

SEQ ID NO: 4793 - protein, 9 aa, Homo sapiens
SSPPYYEFL

SEQ ID NO: 4794 - protein, 9 aa, Homo sapiens
SSASSTLYL

SEQ ID NO: 4795 - protein, 9 aa, Homo sapiens
FSPSSFSTS

SEQ ID NO: 4796 - protein, 9 aa, Homo sapiens
VGPDHFCVF

SEQ ID NO: 4797 - protein, 9 aa, Homo sapiens
MASESLSVM

SEQ ID NO: 4798 - protein, 9 aa, Homo sapiens
FSTSSSLIL

SEQ ID NO: 4799 - protein, 9 aa, Homo sapiens
FVYGEPREL

SEQ ID NO: 4800 - protein, 9 aa, Homo sapiens
FANTVGLTD

SEQ ID NO: 4801 - protein, 9 aa, Homo sapiens
YKDYFPVIL

SEQ ID NO: 4802 - protein, 9 aa, Homo sapiens
FSTSSSLIL

SEQ ID NO: 4803 - protein, 9 aa, Homo sapiens
HSSPPYYEF

SEQ ID NO: 4804 - protein, 9 aa, Homo sapiens
TLDEKVAEL

SEQ ID NO: 4805 - protein, 9 aa, Homo sapiens
HFCVFANTV

SEQ ID NO: 4806 - protein, 9 aa, Homo sapiens
FVYGEPREL

SEQ ID NO: 4807 - protein, 9 aa, Homo sapiens
KRAREFMEL

SEQ ID NO: 4808 - protein, 9 aa, Homo sapiens
YKDYFPVIL

SEQ ID NO: 4809 - protein, 9 aa, Homo sapiens
HSSPPYYEF

SEQ ID NO: 4810 - protein, 8 aa, Homo sapiens
SSPPYYEF

SEQ ID NO: 4811 - protein, 9 aa, Homo sapiens
KRAREFMEL

SEQ ID NO: 4812 - protein, 9 aa, Homo sapiens
KYKDYFPVI

SEQ ID NO: 4813 - protein, 9 aa, Homo sapiens
FVYGEPREL

SEQ ID NO: 4814 - protein, 8 aa, Homo sapiens
VYGEPREL

SEQ ID NO: 4815 - protein, 9 aa, Homo sapiens
YKDYFPVIL

SEQ ID NO: 4816 - protein, 9 aa, Homo sapiens
HSSPPYYEF

SEQ ID NO: 4817 - protein, 9 aa, Homo sapiens
ISDMLGSLY

SEQ ID NO: 4818 - protein, 10 aa, Homo sapiens
AISDMLGSLY

SEQ ID NO: 4819 - protein, 11 aa, Homo sapiens
LAISDMLGSLY

SEQ ID NO: 4820 - protein, 9 aa, Homo sapiens
ITIFHALRY

SEQ ID NO: 4821 - protein, 10 aa, Homo sapiens
ISDMLGSLYK

SEQ ID NO: 4822 - protein, 9 aa, Homo sapiens
FIFCWAPFV

SEQ ID NO: 4823 - protein, 9 aa, Homo sapiens
SLLGSIFSL

SEQ ID NO: 4824 - protein, 10 aa, Homo sapiens
FIFCWAPFVL

SEQ ID NO: 4825 - protein, 12 aa, Homo sapiens
FVLSLLGSIFSL

SEQ ID NO: 4826 - protein, 10 aa, Homo sapiens
VFIFCWAPFV

SEQ ID NO: 4827 - protein, 10 aa, Homo sapiens
SLFPLMLVFI

SEQ ID NO: 4828 - protein, 10 aa, Homo sapiens
LSLLGSIFSL

SEQ ID NO: 4829 - protein, 10 aa, Homo sapiens
FIYAFRSPEL

SEQ ID NO: 4830 - protein, 9 aa, Homo sapiens
LQAPMYFFI

SEQ ID NO: 4831 - protein, 8 aa, Homo sapiens
SLFPLMLV

SEQ ID NO: 4832 - protein, 9 aa, Homo sapiens
GVLENLIVL

SEQ ID NO: 4833 - protein, 9 aa, Homo sapiens
VLENLIVLL

SEQ ID NO: 4834 - protein, 9 aa, Homo sapiens
SLYKILENI

SEQ ID NO: 4835 - protein, 9 aa, Homo sapiens
SLFQVNGML

SEQ ID NO: 4836 - protein, 9 aa, Homo sapiens
VLPEEIFFT

SEQ ID NO: 4837 - protein, 9 aa, Homo sapiens
ILRNMGYLK

SEQ ID NO: 4838 - protein, 10 aa, Homo sapiens
IILRNMGYLK

SEQ ID NO: 4839 - protein, 10 aa, Homo sapiens
ISDMLGSLYK

SEQ ID NO: 4840 - protein, 11 aa, Homo sapiens
AISDMLGSLYK

SEQ ID NO: 4841 - protein, 9 aa, Homo sapiens
AVIDPFIYA

SEQ ID NO: 4842 - protein, 9 aa, Homo sapiens
VLLAVFKNK

SEQ ID NO: 4843 - protein, 10 aa, Homo sapiens
ISDMLGSLYK

SEQ ID NO: 4844 - protein, 9 aa, Homo sapiens
STLPRANMK

SEQ ID NO: 4845 - protein, 11 aa, Homo sapiens
AISDMLGSLYK

SEQ ID NO: 4846 - protein, 11 aa, Homo sapiens
AVIDPFIYAFR

SEQ ID NO: 4847 - protein, 9 aa, Homo sapiens
AVIDPFIYA

SEQ ID NO: 4848 - protein, 9 aa, Homo sapiens
RYITIFHAL

SEQ ID NO: 4849 - protein, 9 aa, Homo sapiens
VFIFCWAPF

SEQ ID NO: 4850 - protein, 10 aa, Homo sapiens
PYCACYMSLF

SEQ ID NO: 4851 - protein, 9 aa, Homo sapiens
IYAFRSPEL

SEQ ID NO: 4852 - protein, 9 aa, Homo sapiens
VVLTVIWTF

SEQ ID NO: 4853 - protein, 9 aa, Homo sapiens
ILRNMGYLK

SEQ ID NO: 4854 - protein, 9 aa, Homo sapiens
RSHTRKIST

SEQ ID NO: 4855 - protein, 9 aa, Homo sapiens
HTRKISTLP

SEQ ID NO: 4856 - protein, 9 aa, Homo sapiens
AVIDPFIYA

SEQ ID NO: 4857 - protein, 9 aa, Homo sapiens
VLLAVFKNK

SEQ ID NO: 4858 - protein, 9 aa, Homo sapiens
RYITIFHAL

SEQ ID NO: 4859 - protein, 9 aa, Homo sapiens
YITIFHALR

SEQ ID NO: 4860 - protein, 10 aa, Homo sapiens
MFLLARSHTR

SEQ ID NO: 4861 - protein, 10 aa, Homo sapiens
RYITIFHALR

SEQ ID NO: 4862 - protein, 10 aa, Homo sapiens
HTRKISTLPR

SEQ ID NO: 4863 - protein, 11 aa, Homo sapiens
DAFKKMIFCSR

SEQ ID NO: 4864 - protein, 9 aa, Homo sapiens
RYHSIVTMR

SEQ ID NO: 4865 - protein, 8 aa, Homo sapiens
ENILIILR

SEQ ID NO: 4866 - protein, 10 aa, Homo sapiens
LPRANMKGAI

SEQ ID NO: 4867 - protein, 10 aa, Homo sapiens
APMYFFICSL

SEQ ID NO: 4868 - protein, 12 aa, Homo sapiens
LPRANMKGAITL

SEQ ID NO: 4869 - protein, 10 aa, Homo sapiens
VPTVITFTSL

SEQ ID NO: 4870 - protein, 9 aa, Homo sapiens
APFVLHVLL

SEQ ID NO: 4871 - protein, 8 aa, Homo sapiens
YLKPRGSF

SEQ ID NO: 4872 - protein, 9 aa, Homo sapiens
TMRRTVVVL

SEQ ID NO: 4873 - protein, 8 aa, Homo sapiens
HALRYHSI

SEQ ID NO: 4874 - protein, 8 aa, Homo sapiens
YITIFHAL

SEQ ID NO: 4875 - protein, 8 aa, Homo sapiens
DAFKKMIF

SEQ ID NO: 4876 - protein, 8 aa, Homo sapiens
TVITFTSL

SEQ ID NO: 4877 - protein, 9 aa, Homo sapiens
LQAPMYFFI

SEQ ID NO: 4878 - protein, 9 aa, Homo sapiens
EEIFFTISI

SEQ ID NO: 4879 - protein, 10 aa, Homo sapiens
SDMLGSLYKI

SEQ ID NO: 4880 - protein, 9 aa, Homo sapiens
SLYKILENI

SEQ ID NO: 4881 - protein, 9 aa, Homo sapiens
RRTVVVLTV

SEQ ID NO: 4882 - protein, 9 aa, Homo sapiens
FTISIVGVL

SEQ ID NO: 4883 - protein, 9 aa, Homo sapiens
FQVNGMLIM

SEQ ID NO: 4884 - protein, 9 aa, Homo sapiens
MTFCPSNPY

SEQ ID NO: 4885 - protein, 9 aa, Homo sapiens
VIDPFIYAF

SEQ ID NO: 4886 - protein, 9 aa, Homo sapiens
VLHVLLMTF

SEQ ID NO: 4887 - protein, 8 aa, Homo sapiens
YLKPRGSF

SEQ ID NO: 4888 - protein, 9 aa, Homo sapiens
IAADRYITI

SEQ ID NO: 4889 - protein, 9 aa, Homo sapiens
WAPFVLHVL

SEQ ID NO: 4890 - protein, 9 aa, Homo sapiens
ITFTSLFPL

SEQ ID NO: 4891 - protein, 9 aa, Homo sapiens
FTSLFPLML

SEQ ID NO: 4892 - protein, 9 aa, Homo sapiens
RSPELRDAF

SEQ ID NO: 4893 - protein, 10 aa, Homo sapiens
FCPSNPYCAC

SEQ ID NO: 4894 - protein, 9 aa, Homo sapiens
FTISIVGVL

SEQ ID NO: 4895 - protein, 9 aa, Homo sapiens
FSHHVPTVI

SEQ ID NO: 4896 - protein, 9 aa, Homo sapiens
IAADRYITI

SEQ ID NO: 4897 - protein, 8 aa, Homo sapiens
YAFRSPEL

SEQ ID NO: 4898 - protein, 10 aa, Homo sapiens
FIYAFRSPEL

SEQ ID NO: 4899 - protein, 9 aa, Homo sapiens
ISDMLGSLY

SEQ ID NO: 4900 - protein, 9 aa, Homo sapiens
LFQVNGMLI

SEQ ID NO: 4901 - protein, 9 aa, Homo sapiens
TFTSLFPLM

SEQ ID NO: 4902 - protein, 9 aa, Homo sapiens
LFPLMLVFI

SEQ ID NO: 4903 - protein, 9 aa, Homo sapiens
VIDPFIYAF

SEQ ID NO: 4904 - protein, 9 aa, Homo sapiens
IFCWAPFVL

SEQ ID NO: 4905 - protein, 9 aa, Homo sapiens
LRYHSIVTM

SEQ ID NO: 4906 - protein, 9 aa, Homo sapiens
RRTVVVLTV

SEQ ID NO: 4907 - protein, 9 aa, Homo sapiens
FHALRYHSI

SEQ ID NO: 4908 - protein, 8 aa, Homo sapiens
MRRTVVVL

SEQ ID NO: 4909 - protein, 9 aa, Homo sapiens
HHVPTVITF

SEQ ID NO: 4910 - protein, 9 aa, Homo sapiens
DRYITIFHA

SEQ ID NO: 4911 - protein, 9 aa, Homo sapiens
LRYHSIVTM

SEQ ID NO: 4912 - protein, 9 aa, Homo sapiens
IYAFRSPEL

SEQ ID NO: 4913 - protein, 9 aa, Homo sapiens
FHALRYHSI

SEQ ID NO: 4914 - protein, 9 aa, Homo sapiens
HHVPTVITF

SEQ ID NO: 4915 - protein, 8 aa, Homo sapiens
MRRTVVVL

SEQ ID NO: 4916 - protein, 9 aa, Homo sapiens
FSGNQVWRY

SEQ ID NO: 4917 - protein, 9 aa, Homo sapiens
WSDVTPLNF

SEQ ID NO: 4918 - protein, 10 aa, Homo sapiens
FAERYLRSYY

SEQ ID NO: 4919 - protein, 12 aa, Homo sapiens
LSEEDLQFAERY

SEQ ID NO: 4920 - protein, 10 aa, Homo sapiens
FLTKSFWPEL

SEQ ID NO: 4921 - protein, 10 aa, Homo sapiens
YLFFQRTHTV

SEQ ID NO: 4922 - protein, 10 aa, Homo sapiens
RLIEEDFPGI

SEQ ID NO: 4923 - protein, 10 aa, Homo sapiens
SLWSSWDYRL

SEQ ID NO: 4924 - protein, 10 aa, Homo sapiens
SLSLDAITSL

SEQ ID NO: 4925 - protein, 9 aa, Homo sapiens
MQSFFGLEV

SEQ ID NO: 4926 - protein, 9 aa, Homo sapiens
LMFPIYTYT

SEQ ID NO: 4927 - protein, 9 aa, Homo sapiens
KLDDNTLDV

SEQ ID NO: 4928 - protein, 12 aa, Homo sapiens
SLWSSWDYRLYL

SEQ ID NO: 4929 - protein, 10 aa, Homo sapiens
FKVWSDVTPL

SEQ ID NO: 4930 - protein, 9 aa, Homo sapiens
TLLFSGNQV

SEQ ID NO: 4931 - protein, 9 aa, Homo sapiens
RLHDGIADI

SEQ ID NO: 4932 - protein, 10 aa, Homo sapiens
SIWSNRIVRV

SEQ ID NO: 4933 - protein, 9 aa, Homo sapiens
GIGDKVDAV

SEQ ID NO: 4934 - protein, 10 aa, Homo sapiens
SLRGETMIFK

SEQ ID NO: 4935 - protein, 11 aa, Homo sapiens
LMFPIYTYTGK

SEQ ID NO: 4936 - protein, 9 aa, Homo sapiens
LIFIFRGRK

SEQ ID NO: 4937 - protein, 9 aa, Homo sapiens
KISELGLPK

SEQ ID NO: 4938 - protein, 11 aa, Homo sapiens
RVMPANSILWC

SEQ ID NO: 4939 - protein, 9 aa, Homo sapiens
KISELGLPK

SEQ ID NO: 4940 - protein, 10 aa, Homo sapiens
MIFKDRFFWR

SEQ ID NO: 4941 - protein, 10 aa, Homo sapiens
KSFWPELPNR

SEQ ID NO: 4942 - protein, 9 aa, Homo sapiens
SIWSNRIVR

SEQ ID NO: 4943 - protein, 11 aa, Homo sapiens
NVFPRTLKWSK

SEQ ID NO: 4944 - protein, 10 aa, Homo sapiens
IYFFNGPIQF

SEQ ID NO: 4945 - protein, 9 aa, Homo sapiens
YFFNGPIQF

SEQ ID NO: 4946 - protein, 9 aa, Homo sapiens
SWDYRLYLF

SEQ ID NO: 4947 - protein, 10 aa, Homo sapiens
VWSDVTPLNF

SEQ ID NO: 4948 - protein, 10 aa, Homo sapiens
RSYYHPTNLA

SEQ ID NO: 4949 - protein, 9 aa, Homo sapiens
RSYYHPTNL

SEQ ID NO: 4950 - protein, 9 aa, Homo sapiens
RGRKFWALN

SEQ ID NO: 4951 - protein, 9 aa, Homo sapiens
LTKSFWPEL

SEQ ID NO: 4952 - protein, 9 aa, Homo sapiens
HAFPPGPNY

SEQ ID NO: 4953 - protein, 10 aa, Homo sapiens
SLRGETMIFK

SEQ ID NO: 4954 - protein, 10 aa, Homo sapiens
MIFKDRFFWR

SEQ ID NO: 4955 - protein, 9 aa, Homo sapiens
HIMDKDYPR

SEQ ID NO: 4956 - protein, 9 aa, Homo sapiens
IFKDRFFWR

SEQ ID NO: 4957 - protein, 9 aa, Homo sapiens
DLIFIFRGR

SEQ ID NO: 4958 - protein, 10 aa, Homo sapiens
DYRLYLFFQR

SEQ ID NO: 4959 - protein, 11 aa, Homo sapiens
EYSIWSNRIVR

SEQ ID NO: 4960 - protein, 10 aa, Homo sapiens
FPRTLKWSKM

SEQ ID NO: 4961 - protein, 9 aa, Homo sapiens
HPTNLAGIL

SEQ ID NO: 4962 - protein, 9 aa, Homo sapiens
RVMPANSIL

SEQ ID NO: 4963 - protein, 9 aa, Homo sapiens
YPFDGPSGL

SEQ ID NO: 4964 - protein, 10 aa, Homo sapiens
YPFDGPSGLL

SEQ ID NO: 4965 - protein, 9 aa, Homo sapiens
HPQQVDAEL

SEQ ID NO: 4966 - protein, 9 aa, Homo sapiens
FRGRKFWAL

SEQ ID NO: 4967 - protein, 11 aa, Homo sapiens
FIFRGRKFWAL

SEQ ID NO: 4968 - protein, 9 aa, Homo sapiens
WTHCRALPL

SEQ ID NO: 4969 - protein, 8 aa, Homo sapiens
YPKKISEL

SEQ ID NO: 4970 - protein, 9 aa, Homo sapiens
TLKWSKMNL

SEQ ID NO: 4971 - protein, 9 aa, Homo sapiens
EGYPKKISE

SEQ ID NO: 4972 - protein, 9 aa, Homo sapiens
REMQSFFGL

SEQ ID NO: 4973 - protein, 9 aa, Homo sapiens
ADIMISFGI

SEQ ID NO: 4974 - protein, 10 aa, Homo sapiens
FEYSIWSNRI

SEQ ID NO: 4975 - protein, 9 aa, Homo sapiens
RLHDGIADI

SEQ ID NO: 4976 - protein, 9 aa, Homo sapiens
GLPKEVKKI

SEQ ID NO: 4977 - protein, 9 aa, Homo sapiens
MQSFFGLEV

SEQ ID NO: 4978 - protein, 9 aa, Homo sapiens
YTYTGKSHF

SEQ ID NO: 4979 - protein, 9 aa, Homo sapiens
YFFNGPIQF

SEQ ID NO: 4980 - protein, 9 aa, Homo sapiens
WTHCRALPL

SEQ ID NO: 4981 - protein, 9 aa, Homo sapiens
HAFPPGPNY

SEQ ID NO: 4982 - protein, 9 aa, Homo sapiens
GIADIMISF

SEQ ID NO: 4983 - protein, 9 aa, Homo sapiens
ALMFPIYTY

SEQ ID NO: 4984 - protein, 9 aa, Homo sapiens
SSWDYRLYL

SEQ ID NO: 4985 - protein, 9 aa, Homo sapiens
RVMPANSIL

SEQ ID NO: 4986 - protein, 9 aa, Homo sapiens
RSYYHPTNL

SEQ ID NO: 4987 - protein, 9 aa, Homo sapiens
VTPLNFTRL

SEQ ID NO: 4988 - protein, 10 aa, Homo sapiens
YTPDMTHSEV

SEQ ID NO: 4989 - protein, 8 aa, Homo sapiens
VMPANSIL

SEQ ID NO: 4990 - protein, 9 aa, Homo sapiens
LSLDAITSL

SEQ ID NO: 4991 - protein, 9 aa, Homo sapiens
RVMPANSIL

SEQ ID NO: 4992 - protein, 9 aa, Homo sapiens
WTHCRALPL

SEQ ID NO: 4993 - protein, 10 aa, Homo sapiens
AAYEHPSHDL

SEQ ID NO: 4994 - protein, 9 aa, Homo sapiens
LSWTHCRAL

SEQ ID NO: 4995 - protein, 9 aa, Homo sapiens
RYDDTNHIM

SEQ ID NO: 4996 - protein, 10 aa, Homo sapiens
WRYDDTNHIM

SEQ ID NO: 4997 - protein, 10 aa, Homo sapiens
YPFDGPSGLL

SEQ ID NO: 4998 - protein, 9 aa, Homo sapiens
SWDYRLYLF

SEQ ID NO: 4999 - protein, 8 aa, Homo sapiens
FFNGPIQF

SEQ ID NO: 5000 - protein, 9 aa, Homo sapiens
WRYDDTNHI

SEQ ID NO: 5001 - protein, 9 aa, Homo sapiens
FRGRKFWAL

SEQ ID NO: 5002 - protein, 9 aa, Homo sapiens
YFFNGPIQF

SEQ ID NO: 5003 - protein, 9 aa, Homo sapiens
RSYYHPTNL

SEQ ID NO: 5004 - protein, 9 aa, Homo sapiens
SSWDYRLYL

SEQ ID NO: 5005 - protein, 9 aa, Homo sapiens
FNGPIQFEY

SEQ ID NO: 5006 - protein, 9 aa, Homo sapiens
YFFNGPIQF

SEQ ID NO: 5007 - protein, 9 aa, Homo sapiens
FRGRKFWAL

SEQ ID NO: 5008 - protein, 9 aa, Homo sapiens
LFFQRTHTV

SEQ ID NO: 5009 - protein, 9 aa, Homo sapiens
NRIDAAYEH

SEQ ID NO: 5010 - protein, 9 aa, Homo sapiens
GYPKKISEL

SEQ ID NO: 5011 - protein, 9 aa, Homo sapiens
PTDNQGTDV

SEQ ID NO: 5012 - protein, 12 aa, Homo sapiens
PTDNQGTDVEAF

SEQ ID NO: 5013 - protein, 12 aa, Homo sapiens
GTDVEAFQQELA

SEQ ID NO: 5014 - protein, 9 aa, Homo sapiens
VLEAGEGQL

SEQ ID NO: 5015 - protein, 9 aa, Homo sapiens
GTDVEAFQQ

SEQ ID NO: 5016 - protein, 10 aa, Homo sapiens
FQQELALLKI

SEQ ID NO: 5017 - protein, 10 aa, Homo sapiens
TLPTFDPTKV

SEQ ID NO: 5018 - protein, 8 aa, Homo sapiens
FQQELALL

SEQ ID NO: 5019 - protein, 9 aa, Homo sapiens
VLEAGEGQL

SEQ ID NO: 5020 - protein, 11 aa, Homo sapiens
GTLPTFDPTKV

SEQ ID NO: 5021 - protein, 11 aa, Homo sapiens
AFQQELALLKI

SEQ ID NO: 5022 - protein, 10 aa, Homo sapiens
KVLEAGEGQL

SEQ ID NO: 5023 - protein, 12 aa, Homo sapiens
EAFQQELALLKI

SEQ ID NO: 5024 - protein, 11 aa, Homo sapiens
TLPTFDPTKVL

SEQ ID NO: 5025 - protein, 9 aa, Homo sapiens
FQQELALLK

SEQ ID NO: 5026 - protein, 9 aa, Homo sapiens
GWAGTREEV

SEQ ID NO: 5027 - protein, 9 aa, Homo sapiens
IKNEGAPAV

SEQ ID NO: 5028 - protein, 9 aa, Homo sapiens
AVQGTDVEA

SEQ ID NO: 5029 - protein, 8 aa, Homo sapiens
ALLKIEDA

SEQ ID NO: 5030 - protein, 10 aa, Homo sapiens
GTLPTFDPTK

SEQ ID NO: 5031 - protein, 10 aa, Homo sapiens
AFQQELALLK

SEQ ID NO: 5032 - protein, 9 aa, Homo sapiens
GIAPSGEIK

SEQ ID NO: 5033 - protein, 9 aa, Homo sapiens
FQQELALLK

SEQ ID NO: 5034 - protein, 9 aa, Homo sapiens
IVQQPTEEK

SEQ ID NO: 5035 - protein, 10 aa, Homo sapiens
GTLPTFDPTK

SEQ ID NO: 5036 - protein, 9 aa, Homo sapiens
GIAPSGEIK

SEQ ID NO: 5037 - protein, 9 aa, Homo sapiens
IVQQPTEEK

SEQ ID NO: 5038 - protein, 9 aa, Homo sapiens
FQQELALLK

SEQ ID NO: 5039 - protein, 9 aa, Homo sapiens
AFQQELALL

SEQ ID NO: 5040 - protein, 11 aa, Homo sapiens
VEAFQQELALL

SEQ ID NO: 5041 - protein, 10 aa, Homo sapiens
EAFQQELALL

SEQ ID NO: 5042 - protein, 9 aa, Homo sapiens
VREGTLPTF

SEQ ID NO: 5043 - protein, 9 aa, Homo sapiens
VQGTDVEAF

SEQ ID NO: 5044 - protein, 10 aa, Homo sapiens
GTLPTFDPTK

SEQ ID NO: 5045 - protein, 9 aa, Homo sapiens
VTRSQSSER

SEQ ID NO: 5046 - protein, 9 aa, Homo sapiens
SSQPVGPVI

SEQ ID NO: 5047 - protein, 9 aa, Homo sapiens
PTFDPTKVL

SEQ ID NO: 5048 - protein, 9 aa, Homo sapiens
GTREEVRDM

SEQ ID NO: 5049 - protein, 9 aa, Homo sapiens
IVQQPTEEK

SEQ ID NO: 5050 - protein, 9 aa, Homo sapiens
VTRSQSSER

SEQ ID NO: 5051 - protein, 11 aa, Homo sapiens
EVRDMSEHVTR

SEQ ID NO: 5052 - protein, 9 aa, Homo sapiens
MQAPWAGNR

SEQ ID NO: 5053 - protein, 8 aa, Homo sapiens
DMSEHVTR

SEQ ID NO: 5054 - protein, 9 aa, Homo sapiens
APAVQGTDV

SEQ ID NO: 5055 - protein, 10 aa, Homo sapiens
LPTFDPTKVL

SEQ ID NO: 5056 - protein, 10 aa, Homo sapiens
APWAGNRGWA

SEQ ID NO: 5057 - protein, 9 aa, Homo sapiens
GPDVREGTL

SEQ ID NO: 5058 - protein, 9 aa, Homo sapiens
WAGNRGWAG

SEQ ID NO: 5059 - protein, 9 aa, Homo sapiens
EAFQQELAL

SEQ ID NO: 5060 - protein, 10 aa, Homo sapiens
WAGNRGWAGT

SEQ ID NO: 5061 - protein, 8 aa, Homo sapiens
LALLKIED

SEQ ID NO: 5062 - protein, 8 aa, Homo sapiens
DPTKVLEA

SEQ ID NO: 5063 - protein, 9 aa, Homo sapiens
ELALLKIED

SEQ ID NO: 5064 - protein, 10 aa, Homo sapiens
FQQELALLKI

SEQ ID NO: 5065 - protein, 9 aa, Homo sapiens
SSQPVGPVI

SEQ ID NO: 5066 - protein, 9 aa, Homo sapiens
QQELALLKI

SEQ ID NO: 5067 - protein, 9 aa, Homo sapiens
SQPVGPVIV

SEQ ID NO: 5068 - protein, 9 aa, Homo sapiens
SSQPVGPVI

SEQ ID NO: 5069 - protein, 9 aa, Homo sapiens
EAFQQELAL

SEQ ID NO: 5070 - protein, 9 aa, Homo sapiens
GTREEVRDM

SEQ ID NO: 5071 - protein, 10 aa, Homo sapiens
DVREGTLPTF

SEQ ID NO: 5072 - protein, 9 aa, Homo sapiens
VQGTDVEAF

SEQ ID NO: 5073 - protein, 8 aa, Homo sapiens
EVRDMSEH

SEQ ID NO: 5074 - protein, 9 aa, Homo sapiens
SSQPVGPVI

SEQ ID NO: 5075 - protein, 9 aa, Homo sapiens
VLEAGEGQL

SEQ ID NO: 5076 - protein, 9 aa, Homo sapiens
AFQQELALL

SEQ ID NO: 5077 - protein, 11 aa, Homo sapiens
TLPTFDPTKVL

SEQ ID NO: 5078 - protein, 10 aa, Homo sapiens
TLPTFDPTKV

SEQ ID NO: 5079 - protein, 9 aa, Homo sapiens
DAPGDGPDV

SEQ ID NO: 5080 - protein, 9 aa, Homo sapiens
SSQPVGPVI

SEQ ID NO: 5081 - protein, 9 aa, Homo sapiens
EAFQQELAL

SEQ ID NO: 5082 - protein, 10 aa, Homo sapiens
VEAFQQELAL

SEQ ID NO: 5083 - protein, 9 aa, Homo sapiens
PTFDPTKVL

SEQ ID NO: 5084 - protein, 9 aa, Homo sapiens
FQQELALLK

SEQ ID NO: 5085 - protein, 9 aa, Homo sapiens
AFQQELALL

SEQ ID NO: 5086 - protein, 9 aa, Homo sapiens
VREGTLPTF

SEQ ID NO: 5087 - protein, 8 aa, Homo sapiens
TFDPTKVL

SEQ ID NO: 5088 - protein, 9 aa, Homo sapiens
TFDPTKVLE

SEQ ID NO: 5089 - protein, 10 aa, Homo sapiens
TFDPTKVLEA

SEQ ID NO: 5090 - protein, 9 aa, Homo sapiens
VREGTLPTF

SEQ ID NO: 5091 - protein, 9 aa, Homo sapiens
SSQPVGPVI

SEQ ID NO: 5092 - protein, 10 aa, Homo sapiens
FQQELALLKI

SEQ ID NO: 5093 - protein, 8 aa, Homo sapiens
TREEVRDM

SEQ ID NO: 5094 - protein, 10 aa, Homo sapiens
KRQEEEPPTD

SEQ ID NO: 5095 - protein, 9 aa, Homo sapiens
GDGPDVREG

SEQ ID NO: 5096 - protein, 9 aa, Homo sapiens
VREGTLPTF

SEQ ID NO: 5097 - protein, 9 aa, Homo sapiens
AFQQELALL

SEQ ID NO: 5098 - protein, 9 aa, Homo sapiens
SSQPVGPVI

SEQ ID NO: 5099 - protein, 8 aa, Homo sapiens
TREEVRDM

SEQ ID NO: 5100 - protein, 8 aa, Homo sapiens
FQQELALL

SEQ ID NO: 5101 - protein, 9 aa, Homo sapiens
FLMKKELDY

SEQ ID NO: 5102 - protein, 9 aa, Homo sapiens
MIIGGGMAY

SEQ ID NO: 5103 - protein, 9 aa, Homo sapiens
VADKIQLIK

SEQ ID NO: 5104 - protein, 8 aa, Homo sapiens
ASIPSIKY

SEQ ID NO: 5105 - protein, 9 aa, Homo sapiens
NMEIGASLF

SEQ ID NO: 5106 - protein, 9 aa, Homo sapiens
ALMDEIVKA

SEQ ID NO: 5107 - protein, 11 aa, Homo sapiens
FLMKKELDYFA

SEQ ID NO: 5108 - protein, 10 aa, Homo sapiens
YSLAPVAVEL

SEQ ID NO: 5109 - protein, 9 aa, Homo sapiens
SLAPVAVEL

SEQ ID NO: 5110 - protein, 9 aa, Homo sapiens
IVWNGPLGV

SEQ ID NO: 5111 - protein, 10 aa, Homo sapiens
FLKDCVGAEV

SEQ ID NO: 5112 - protein, 9 aa, Homo sapiens
VIMRVDFNV

SEQ ID NO: 5113 - protein, 12 aa, Homo sapiens
GFLMKKELDYFA

SEQ ID NO: 5114 - protein, 9 aa, Homo sapiens
GMAYTFLKV

SEQ ID NO: 5115 - protein, 9 aa, Homo sapiens
KILPGVEAL

SEQ ID NO: 5116 - protein, 9 aa, Homo sapiens
CLDNGAKAV

SEQ ID NO: 5117 - protein, 9 aa, Homo sapiens
KLDVRGKRV

SEQ ID NO: 5118 - protein, 10 aa, Homo sapiens
LLEGKILPGV

SEQ ID NO: 5119 - protein, 11 aa, Homo sapiens
ELLEGKILPGV

SEQ ID NO: 5120 - protein, 10 aa, Homo sapiens
RVDFNVPMKK

SEQ ID NO: 5121 - protein, 12 aa, Homo sapiens
IMRVDFNVPMKK

SEQ ID NO: 5122 - protein, 10 aa, Homo sapiens
RIKASIPSIK

SEQ ID NO: 5123 - protein, 10 aa, Homo sapiens
KVADKIQLIK

SEQ ID NO: 5124 - protein, 10 aa, Homo sapiens
GVFEWDAFAK

SEQ ID NO: 5125 - protein, 10 aa, Homo sapiens
SLAPVAVELK

SEQ ID NO: 5126 - protein, 10 aa, Homo sapiens
GVFEWDAFAK

SEQ ID NO: 5127 - protein, 9 aa, Homo sapiens
GGMAYTFLK

SEQ ID NO: 5128 - protein, 9 aa, Homo sapiens
KASGFLMKK

SEQ ID NO: 5129 - protein, 10 aa, Homo sapiens
KVADKIQLIK

SEQ ID NO: 5130 - protein, 9 aa, Homo sapiens
VWNGPLGVF

SEQ ID NO: 5131 - protein, 9 aa, Homo sapiens
KYSLAPVAV

SEQ ID NO: 5132 - protein, 9 aa, Homo sapiens
IGGGMAYTF

SEQ ID NO: 5133 - protein, 11 aa, Homo sapiens
VWNGPLGVFEW

SEQ ID NO: 5134 - protein, 9 aa, Homo sapiens
VRITFPVDF

SEQ ID NO: 5135 - protein, 9 aa, Homo sapiens
RIKASIPSI

SEQ ID NO: 5136 - protein, 10 aa, Homo sapiens
RIKASIPSIK

SEQ ID NO: 5137 - protein, 9 aa, Homo sapiens
KASGFLMKK

SEQ ID NO: 5138 - protein, 9 aa, Homo sapiens
SNKNHAQVV

SEQ ID NO: 5139 - protein, 9 aa, Homo sapiens
KGQDPSGKK

SEQ ID NO: 5140 - protein, 8 aa, Homo sapiens
IVKDIMAK

SEQ ID NO: 5141 - protein, 9 aa, Homo sapiens
HAQVVAQAR

SEQ ID NO: 5142 - protein, 10 aa, Homo sapiens
FAKALENPVR

SEQ ID NO: 5143 - protein, 10 aa, Homo sapiens
DVRGKRVIMR

SEQ ID NO: 5144 - protein, 9 aa, Homo sapiens
LTLDKLDVR

SEQ ID NO: 5145 - protein, 9 aa, Homo sapiens
LPHKASGFL

SEQ ID NO: 5146 - protein, 9 aa, Homo sapiens
NPVRPFLAI

SEQ ID NO: 5147 - protein, 10 aa, Homo sapiens
NPVRPFLAIL

SEQ ID NO: 5148 - protein, 9 aa, Homo sapiens
NPAPGSVIL

SEQ ID NO: 5149 - protein, 10 aa, Homo sapiens
NPAPGSVILL

SEQ ID NO: 5150 - protein, 10 aa, Homo sapiens
APVAVELKSL

SEQ ID NO: 5151 - protein, 9 aa, Homo sapiens
MSLSKKLTL

SEQ ID NO: 5152 - protein, 10 aa, Homo sapiens
FLMKKELDYF

SEQ ID NO: 5153 - protein, 8 aa, Homo sapiens
SLSKKLTL

SEQ ID NO: 5154 - protein, 9 aa, Homo sapiens
SGFLMKKEL

SEQ ID NO: 5155 - protein, 11 aa, Homo sapiens
LENPVRPFLAI

SEQ ID NO: 5156 - protein, 9 aa, Homo sapiens
LEGKILPGV

SEQ ID NO: 5157 - protein, 12 aa, Homo sapiens
LDYFAKALENPV

SEQ ID NO: 5158 - protein, 9 aa, Homo sapiens
GQDPSGKKI

SEQ ID NO: 5159 - protein, 9 aa, Homo sapiens
ALMDEIVKA

SEQ ID NO: 5160 - protein, 9 aa, Homo sapiens
GMAYTFLKV

SEQ ID NO: 5161 - protein, 9 aa, Homo sapiens
MIIGGGMAY

SEQ ID NO: 5162 - protein, 9 aa, Homo sapiens
MAYTFLKVL

SEQ ID NO: 5163 - protein, 9 aa, Homo sapiens
FAKGTKALM

SEQ ID NO: 5164 - protein, 9 aa, Homo sapiens
AEPDKIEAF

SEQ ID NO: 5165 - protein, 9 aa, Homo sapiens
SLAPVAVEL

SEQ ID NO: 5166 - protein, 9 aa, Homo sapiens
SLAPVAVEL

SEQ ID NO: 5167 - protein, 9 aa, Homo sapiens
MAYTFLKVL

SEQ ID NO: 5168 - protein, 10 aa, Homo sapiens
YSLAPVAVEL

SEQ ID NO: 5169 - protein, 8 aa, Homo sapiens
ILPGVEAL

SEQ ID NO: 5170 - protein, 8 aa, Homo sapiens
LAPVAVEL

SEQ ID NO: 5171 - protein, 8 aa, Homo sapiens
ISPGWMGL

SEQ ID NO: 5172 - protein, 9 aa, Homo sapiens
MAYTFLKVL

SEQ ID NO: 5173 - protein, 10 aa, Homo sapiens
YSLAPVAVEL

SEQ ID NO: 5174 - protein, 9 aa, Homo sapiens
MSLSKKLTL

SEQ ID NO: 5175 - protein, 9 aa, Homo sapiens
FAKGTKALM

SEQ ID NO: 5176 - protein, 8 aa, Homo sapiens
FAKGTKAL

SEQ ID NO: 5177 - protein, 9 aa, Homo sapiens
VWNGPLGVF

SEQ ID NO: 5178 - protein, 9 aa, Homo sapiens
LENPVRPFL

SEQ ID NO: 5179 - protein, 9 aa, Homo sapiens
NMEIGASLF

SEQ ID NO: 5180 - protein, 8 aa, Homo sapiens
KFDENAQV

SEQ ID NO: 5181 - protein, 8 aa, Homo sapiens
LAPVAVEL

SEQ ID NO: 5182 - protein, 9 aa, Homo sapiens
VRITFPVDF

SEQ ID NO: 5183 - protein, 9 aa, Homo sapiens
MAYTFLKVL

SEQ ID NO: 5184 - protein, 10 aa, Homo sapiens
VRITFPVDFV

SEQ ID NO: 5185 - protein, 9 aa, Homo sapiens
SLAPVAVEL

SEQ ID NO: 5186 - protein, 8 aa, Homo sapiens
KRVIMRVD

SEQ ID NO: 5187 - protein, 8 aa, Homo sapiens
LENPVRPF

SEQ ID NO: 5188 - protein, 9 aa, Homo sapiens
VRITFPVDF

SEQ ID NO: 5189 - protein, 9 aa, Homo sapiens
MAYTFLKVL

SEQ ID NO: 5190 - protein, 9 aa, Homo sapiens
MSLSKKLTL

SEQ ID NO: 5191 - protein, 8 aa, Homo sapiens
VRPFLAIL

SEQ ID NO: 5192 - protein, 9 aa, Homo sapiens
SLAPVAVEL

SEQ ID NO: 5193 - protein, 9 aa, Homo sapiens
VTDMCKTEY

SEQ ID NO: 5194 - protein, 10 aa, Homo sapiens
WVTDMCKTEY

SEQ ID NO: 5195 - protein, 9 aa, Homo sapiens
MLDILLTEY

SEQ ID NO: 5196 - protein, 9 aa, Homo sapiens
MLDILLVKY

SEQ ID NO: 5197 - protein, 9 aa, Homo sapiens
MLIFWTITL

SEQ ID NO: 5198 - protein, 9 aa, Homo sapiens
AQMLDILLV

SEQ ID NO: 5199 - protein, 10 aa, Homo sapiens
GIWAGQVLPV

SEQ ID NO: 5200 - protein, 12 aa, Homo sapiens
FLWNNNVINPTL

SEQ ID NO: 5201 - protein, 12 aa, Homo sapiens
LLTEYSYPPSKV

SEQ ID NO: 5202 - protein, 8 aa, Homo sapiens
KLFEVEEV

SEQ ID NO: 5203 - protein, 8 aa, Homo sapiens
QMLDILLV

SEQ ID NO: 5204 - protein, 10 aa, Homo sapiens
LIFWTITLFL

SEQ ID NO: 5205 - protein, 11 aa, Homo sapiens
MLIFWTITLFL

SEQ ID NO: 5206 - protein, 9 aa, Homo sapiens
VINPTLPKV

SEQ ID NO: 5207 - protein, 10 aa, Homo sapiens
KLDVGTIEKV

SEQ ID NO: 5208 - protein, 10 aa, Homo sapiens
KLFEVEEVNC

SEQ ID NO: 5209 - protein, 9 aa, Homo sapiens
LLLSDPSTI

SEQ ID NO: 5210 - protein, 9 aa, Homo sapiens
ILNPDGFAA

SEQ ID NO: 5211 - protein, 10 aa, Homo sapiens
RLDPSDADFV

SEQ ID NO: 5212 - protein, 9 aa, Homo sapiens
GLDPVEASF

SEQ ID NO: 5213 - protein, 9 aa, Homo sapiens
AAYPCTSYK

SEQ ID NO: 5214 - protein, 10 aa, Homo sapiens
KTEYSYPPSK

SEQ ID NO: 5215 - protein, 10 aa, Homo sapiens
LVKYSYPPSK

SEQ ID NO: 5216 - protein, 10 aa, Homo sapiens
FAAYPCTSYK

SEQ ID NO: 5217 - protein, 9 aa, Homo sapiens
NVINPTLPK

SEQ ID NO: 5218 - protein, 9 aa, Homo sapiens
KIGTRFLLY

SEQ ID NO: 5219 - protein, 9 aa, Homo sapiens
AAYPCTSYK

SEQ ID NO: 5220 - protein, 9 aa, Homo sapiens
NVINPTLPK

SEQ ID NO: 5221 - protein, 10 aa, Homo sapiens
STHSYEFDAK

SEQ ID NO: 5222 - protein, 9 aa, Homo sapiens
KILPWSPEK

SEQ ID NO: 5223 - protein, 10 aa, Homo sapiens
AYPCTSYKSF

SEQ ID NO: 5224 - protein, 9 aa, Homo sapiens
SYKYYLESI

SEQ ID NO: 5225 - protein, 10 aa, Homo sapiens
SYPPSKVHLI

SEQ ID NO: 5226 - protein, 9 aa, Homo sapiens
SYPPSKVHL

SEQ ID NO: 5227 - protein, 12 aa, Homo sapiens
YYLESILNPDGF

SEQ ID NO: 5228 - protein, 9 aa, Homo sapiens
AAYPCTSYK

SEQ ID NO: 5229 - protein, 9 aa, Homo sapiens
RSRMPTDGS

SEQ ID NO: 5230 - protein, 10 aa, Homo sapiens
KTEYSYPPSK

SEQ ID NO: 5231 - protein, 9 aa, Homo sapiens
KVKFLWNNN

SEQ ID NO: 5232 - protein, 9 aa, Homo sapiens
KILPWSPEK

SEQ ID NO: 5233 - protein, 9 aa, Homo sapiens
SYKSFESDK

SEQ ID NO: 5234 - protein, 9 aa, Homo sapiens
NTHQYSIFR

SEQ ID NO: 5235 - protein, 9 aa, Homo sapiens
HYADKFAGR

SEQ ID NO: 5236 - protein, 9 aa, Homo sapiens
DFVACNHLR

SEQ ID NO: 5237 - protein, 9 aa, Homo sapiens
EASNFARWR

SEQ ID NO: 5238 - protein, 9 aa, Homo sapiens
EPWGGTAIR

SEQ ID NO: 5239 - protein, 9 aa, Homo sapiens
MPGCKKNAL

SEQ ID NO: 5240 - protein, 10 aa, Homo sapiens
TPGLSRITGL

SEQ ID NO: 5241 - protein, 10 aa, Homo sapiens
SPEKIGTRFL

SEQ ID NO: 5242 - protein, 9 aa, Homo sapiens
APLIPFLGF

SEQ ID NO: 5243 - protein, 9 aa, Homo sapiens
NPNNFQILL

SEQ ID NO: 5244 - protein, 9 aa, Homo sapiens
MPGCKKNAL

SEQ ID NO: 5245 - protein, 9 aa, Homo sapiens
HLRSYKYYL

SEQ ID NO: 5246 - protein, 10 aa, Homo sapiens
FARWRYGVSI

SEQ ID NO: 5247 - protein, 8 aa, Homo sapiens
TGQIKVAL

SEQ ID NO: 5248 - protein, 8 aa, Homo sapiens
YPPSKVHL

SEQ ID NO: 5249 - protein, 9 aa, Homo sapiens
SDADFVDVI

SEQ ID NO: 5250 - protein, 9 aa, Homo sapiens
AQMLDILLV

SEQ ID NO: 5251 - protein, 9 aa, Homo sapiens
YNFCSEDTV

SEQ ID NO: 5252 - protein, 9 aa, Homo sapiens
HQYSIFRGI

SEQ ID NO: 5253 - protein, 9 aa, Homo sapiens
TQAANNVRV

SEQ ID NO: 5254 - protein, 9 aa, Homo sapiens
FAAYPCTSY

SEQ ID NO: 5255 - protein, 10 aa, Homo sapiens
FVACNHLRSY

SEQ ID NO: 5256 - protein, 9 aa, Homo sapiens
YSYPPSKVH

SEQ ID NO: 5257 - protein, 10 aa, Homo sapiens
ILKPGSTHSY

SEQ ID NO: 5258 - protein, 9 aa, Homo sapiens
VACNHLRSY

SEQ ID NO: 5259 - protein, 8 aa, Homo sapiens
AAYPCTSY

SEQ ID NO: 5260 - protein, 10 aa, Homo sapiens
YSYPPSKVHL

SEQ ID NO: 5261 - protein, 9 aa, Homo sapiens
VLPVSRSRM

SEQ ID NO: 5262 - protein, 9 aa, Homo sapiens
FFPNGGESM

SEQ ID NO: 5263 - protein, 10 aa, Homo sapiens
SMPGCKKNAL

SEQ ID NO: 5264 - protein, 10 aa, Homo sapiens
YSYPPSKVHL

SEQ ID NO: 5265 - protein, 9 aa, Homo sapiens
HSYEFDAKL

SEQ ID NO: 5266 - protein, 9 aa, Homo sapiens
FAAYPCTSY

SEQ ID NO: 5267 - protein, 9 aa, Homo sapiens
YSYPPSKVH

SEQ ID NO: 5268 - protein, 9 aa, Homo sapiens
TAIRPLKIL

SEQ ID NO: 5269 - protein, 9 aa, Homo sapiens
FFPNGGESM

SEQ ID NO: 5270 - protein, 9 aa, Homo sapiens
RLDPSDADF

SEQ ID NO: 5271 - protein, 9 aa, Homo sapiens
GLDPVEASF

SEQ ID NO: 5272 - protein, 9 aa, Homo sapiens
SYPPSKVHL

SEQ ID NO: 5273 - protein, 9 aa, Homo sapiens
IFWTITLFL

SEQ ID NO: 5274 - protein, 9 aa, Homo sapiens
SFESTPEEV

SEQ ID NO: 5275 - protein, 9 aa, Homo sapiens
WRYGVSITL

SEQ ID NO: 5276 - protein, 9 aa, Homo sapiens
VREDTLLTL

SEQ ID NO: 5277 - protein, 9 aa, Homo sapiens
ARWRYGVSI

SEQ ID NO: 5278 - protein, 9 aa, Homo sapiens
SRMPTDGSL

SEQ ID NO: 5279 - protein, 9 aa, Homo sapiens
RSYKYYLES

SEQ ID NO: 5280 - protein, 9 aa, Homo sapiens
WRYGVSITL

SEQ ID NO: 5281 - protein, 9 aa, Homo sapiens
FFPNGGESM

SEQ ID NO: 5282 - protein, 9 aa, Homo sapiens
VREDTLLTL

SEQ ID NO: 5283 - protein, 9 aa, Homo sapiens
SYPPSKVHL

SEQ ID NO: 5284 - protein, 9 aa, Homo sapiens
SRMPTDGSL

SEQ ID NO: 5285 - protein, 10 aa, Homo sapiens
GTDPNIPDEY

SEQ ID NO: 5286 - protein, 9 aa, Homo sapiens
LMAKALLLY

SEQ ID NO: 5287 - protein, 10 aa, Homo sapiens
SDVDIRKDLY

SEQ ID NO: 5288 - protein, 12 aa, Homo sapiens
LSDYKEKQMPKY

SEQ ID NO: 5289 - protein, 12 aa, Homo sapiens
MKSDVDIRKDLY

SEQ ID NO: 5290 - protein, 11 aa, Homo sapiens
KSDVDIRKDLY

SEQ ID NO: 5291 - protein, 9 aa, Homo sapiens
FPDTENEEY

SEQ ID NO: 5292 - protein, 9 aa, Homo sapiens
FPDNESEEY

SEQ ID NO: 5293 - protein, 9 aa, Homo sapiens
GLTPLLLGV

SEQ ID NO: 5294 - protein, 9 aa, Homo sapiens
LLLEQNIDV

SEQ ID NO: 5295 - protein, 10 aa, Homo sapiens
GLLENLTNGV

SEQ ID NO: 5296 - protein, 9 aa, Homo sapiens
KLMAKALLL

SEQ ID NO: 5297 - protein, 9 aa, Homo sapiens
ALAPSMMKI

SEQ ID NO: 5298 - protein, 8 aa, Homo sapiens
YLEDIESV

SEQ ID NO: 5299 - protein, 10 aa, Homo sapiens
HGLTPLLLGV

SEQ ID NO: 5300 - protein, 9 aa, Homo sapiens
TMDDDTAVL

SEQ ID NO: 5301 - protein, 12 aa, Homo sapiens
FLIKKKANLNAL

SEQ ID NO: 5302 - protein, 10 aa, Homo sapiens
ALFQPCFLGM

SEQ ID NO: 5303 - protein, 9 aa, Homo sapiens
RMQKEIAAL

SEQ ID NO: 5304 - protein, 9 aa, Homo sapiens
LLENLTNGV

SEQ ID NO: 5305 - protein, 10 aa, Homo sapiens
TMDDDTAVLV

SEQ ID NO: 5306 - protein, 10 aa, Homo sapiens
RELPDYLMKI

SEQ ID NO: 5307 - protein, 11 aa, Homo sapiens
LLLDRRCQLNV

SEQ ID NO: 5308 - protein, 9 aa, Homo sapiens
KYLEDIESV

SEQ ID NO: 5309 - protein, 9 aa, Homo sapiens
TLREEIAML

SEQ ID NO: 5310 - protein, 9 aa, Homo sapiens
FLIKKKANL

SEQ ID NO: 5311 - protein, 11 aa, Homo sapiens
ILIHEEKQIEV

SEQ ID NO: 5312 - protein, 9 aa, Homo sapiens
GLLENLTNG

SEQ ID NO: 5313 - protein, 9 aa, Homo sapiens
LLLDRRCQL

SEQ ID NO: 5314 - protein, 10 aa, Homo sapiens
KLMAKALLLY

SEQ ID NO: 5315 - protein, 12 aa, Homo sapiens
TMYPGMAHRMQK

SEQ ID NO: 5316 - protein, 11 aa, Homo sapiens
AIYNEDKLMAK

SEQ ID NO: 5317 - protein, 9 aa, Homo sapiens
GMMGGMHQK

SEQ ID NO: 5318 - protein, 9 aa, Homo sapiens
KTLRSKMGK

SEQ ID NO: 5319 - protein, 9 aa, Homo sapiens
RIIAPPKRK

SEQ ID NO: 5320 - protein, 11 aa, Homo sapiens
ILLTEAPLNPK

SEQ ID NO: 5321 - protein, 10 aa, Homo sapiens
ALFQPCFLGM

SEQ ID NO: 5322 - protein, 9 aa, Homo sapiens
AALAPSMMK

SEQ ID NO: 5323 - protein, 9 aa, Homo sapiens
SAMKTLRNK

SEQ ID NO: 5324 - protein, 9 aa, Homo sapiens
SAMKTLRSK

SEQ ID NO: 5325 - protein, 9 aa, Homo sapiens
QVVKFLIKK

SEQ ID NO: 5326 - protein, 9 aa, Homo sapiens
GMMGGMHQK

SEQ ID NO: 5327 - protein, 9 aa, Homo sapiens
RSQEPEINK

SEQ ID NO: 5328 - protein, 11 aa, Homo sapiens
AIYNEDKLMAK

SEQ ID NO: 5329 - protein, 9 aa, Homo sapiens
RYGRTALIL

SEQ ID NO: 5330 - protein, 9 aa, Homo sapiens
MYPGMAHRM

SEQ ID NO: 5331 - protein, 9 aa, Homo sapiens
KYLEDIESV

SEQ ID NO: 5332 - protein, 9 aa, Homo sapiens
KYPMEHGII

SEQ ID NO: 5333 - protein, 9 aa, Homo sapiens
EYHRICELL

SEQ ID NO: 5334 - protein, 9 aa, Homo sapiens
ILTERGYRF

SEQ ID NO: 5335 - protein, 9 aa, Homo sapiens
KIRIIAPPK

SEQ ID NO: 5336 - protein, 9 aa, Homo sapiens
KTLRSKMGK

SEQ ID NO: 5337 - protein, 9 aa, Homo sapiens
KTLRNKMGK

SEQ ID NO: 5338 - protein, 9 aa, Homo sapiens
RTALHLASA

SEQ ID NO: 5339 - protein, 10 aa, Homo sapiens
RYGRTALILA

SEQ ID NO: 5340 - protein, 9 aa, Homo sapiens
RSQEPEINK

SEQ ID NO: 5341 - protein, 9 aa, Homo sapiens
VVKFLIKKK

SEQ ID NO: 5342 - protein, 9 aa, Homo sapiens
HQKESYVGK

SEQ ID NO: 5343 - protein, 9 aa, Homo sapiens
MLRDTDVNK

SEQ ID NO: 5344 - protein, 9 aa, Homo sapiens
SVKKPFGLR

SEQ ID NO: 5345 - protein, 9 aa, Homo sapiens
TMYPGMAHR

SEQ ID NO: 5346 - protein, 10 aa, Homo sapiens
TTMYPGMAHR

SEQ ID NO: 5347 - protein, 9 aa, Homo sapiens
AAWWGKVPR

SEQ ID NO: 5348 - protein, 9 aa, Homo sapiens
NALPHATLR

SEQ ID NO: 5349 - protein, 9 aa, Homo sapiens
NSNPENVSR

SEQ ID NO: 5350 - protein, 9 aa, Homo sapiens
EVVKLLLDR

SEQ ID NO: 5351 - protein, 10 aa, Homo sapiens
ENSNPENVSR

SEQ ID NO: 5352 - protein, 9 aa, Homo sapiens
KPFGLRSKM

SEQ ID NO: 5353 - protein, 9 aa, Homo sapiens
VPRKDLIVM

SEQ ID NO: 5354 - protein, 8 aa, Homo sapiens
RPRQQGMM

SEQ ID NO: 5355 - protein, 9 aa, Homo sapiens
VPIYEGNAL

SEQ ID NO: 5356 - protein, 11 aa, Homo sapiens
RPRQQGMMGGM

SEQ ID NO: 5357 - protein, 10 aa, Homo sapiens
IPDEYGNTTL

SEQ ID NO: 5358 - protein, 9 aa, Homo sapiens
APEEHPILL

SEQ ID NO: 5359 - protein, 10 aa, Homo sapiens
VPRKDLIVML

SEQ ID NO: 5360 - protein, 9 aa, Homo sapiens
FLIKKKANL

SEQ ID NO: 5361 - protein, 9 aa, Homo sapiens
LLLDRRCQL

SEQ ID NO: 5362 - protein, 9 aa, Homo sapiens
MMKIRIIAP

SEQ ID NO: 5363 - protein, 10 aa, Homo sapiens
VLDNKKRTAL

SEQ ID NO: 5364 - protein, 12 aa, Homo sapiens
FLIKKKANLNAL

SEQ ID NO: 5365 - protein, 8 aa, Homo sapiens
MMKIRIIA

SEQ ID NO: 5366 - protein, 9 aa, Homo sapiens
APPKRKYSV

SEQ ID NO: 5367 - protein, 8 aa, Homo sapiens
DYKEKQML

SEQ ID NO: 5368 - protein, 8 aa, Homo sapiens
ESKNKHGL

SEQ ID NO: 5369 - protein, 9 aa, Homo sapiens
EEYHRICEL

SEQ ID NO: 5370 - protein, 9 aa, Homo sapiens
RELENFMAI

SEQ ID NO: 5371 - protein, 10 aa, Homo sapiens
RELPDYLMKI

SEQ ID NO: 5372 - protein, 9 aa, Homo sapiens
KQQVVKFLI

SEQ ID NO: 5373 - protein, 12 aa, Homo sapiens
REYAVSSHHHVI

SEQ ID NO: 5374 - protein, 10 aa, Homo sapiens
DRELENFMAI

SEQ ID NO: 5375 - protein, 9 aa, Homo sapiens
ALAPSMMKI

SEQ ID NO: 5376 - protein, 9 aa, Homo sapiens
ELPDYLMKI

SEQ ID NO: 5377 - protein, 9 aa, Homo sapiens
GLTPLLLGV

SEQ ID NO: 5378 - protein, 9 aa, Homo sapiens
KQIEVVEKM

SEQ ID NO: 5379 - protein, 9 aa, Homo sapiens
YSVWVGGSI

SEQ ID NO: 5380 - protein, 9 aa, Homo sapiens
LMAKALLLY

SEQ ID NO: 5381 - protein, 9 aa, Homo sapiens
IAALAPSMM

SEQ ID NO: 5382 - protein, 9 aa, Homo sapiens
YAIYNEDKL

SEQ ID NO: 5383 - protein, 9 aa, Homo sapiens
VAIQAVPSL

SEQ ID NO: 5384 - protein, 9 aa, Homo sapiens
IIAPPKRKY

SEQ ID NO: 5385 - protein, 9 aa, Homo sapiens
TAREYAVSS

SEQ ID NO: 5386 - protein, 9 aa, Homo sapiens
INKDGDREL

SEQ ID NO: 5387 - protein, 8 aa, Homo sapiens
TMYPGMAH

SEQ ID NO: 5388 - protein, 9 aa, Homo sapiens
SQRFKGSEN

SEQ ID NO: 5389 - protein, 9 aa, Homo sapiens
TMDDDTAVL

SEQ ID NO: 5390 - protein, 9 aa, Homo sapiens
ALPHATLRL

SEQ ID NO: 5391 - protein, 9 aa, Homo sapiens
RMQKEIAAL

SEQ ID NO: 5392 - protein, 9 aa, Homo sapiens
VAIQAVPSL

SEQ ID NO: 5393 - protein, 9 aa, Homo sapiens
KLMAKALLL

SEQ ID NO: 5394 - protein, 10 aa, Homo sapiens
TVPIYEGNAL

SEQ ID NO: 5395 - protein, 9 aa, Homo sapiens
VAPEEHPIL

SEQ ID NO: 5396 - protein, 11 aa, Homo sapiens
NIPDEYGNTTL

SEQ ID NO: 5397 - protein, 10 aa, Homo sapiens
SQPEKMSQEL

SEQ ID NO: 5398 - protein, 9 aa, Homo sapiens
VAIQAVPSL

SEQ ID NO: 5399 - protein, 9 aa, Homo sapiens
IAALAPSMM

SEQ ID NO: 5400 - protein, 9 aa, Homo sapiens
YAVSSHHHV

SEQ ID NO: 5401 - protein, 9 aa, Homo sapiens
YSVWVGGSI

SEQ ID NO: 5402 - protein, 9 aa, Homo sapiens
YAIYNEDKL

SEQ ID NO: 5403 - protein, 8 aa, Homo sapiens
IAMLRLEL

SEQ ID NO: 5404 - protein, 8 aa, Homo sapiens
NALPHATL

SEQ ID NO: 5405 - protein, 9 aa, Homo sapiens
TMDDDTAVL

SEQ ID NO: 5406 - protein, 9 aa, Homo sapiens
MYPGMAHRM

SEQ ID NO: 5407 - protein, 9 aa, Homo sapiens
RLDLAGREL

SEQ ID NO: 5408 - protein, 9 aa, Homo sapiens
LFQPCFLGM

SEQ ID NO: 5409 - protein, 9 aa, Homo sapiens
WGDYDDSAF

SEQ ID NO: 5410 - protein, 8 aa, Homo sapiens
DYDDSAFM

SEQ ID NO: 5411 - protein, 9 aa, Homo sapiens
MDDDTAVLV

SEQ ID NO: 5412 - protein, 9 aa, Homo sapiens
DRYGRTALI

SEQ ID NO: 5413 - protein, 10 aa, Homo sapiens
LDRYGRTALI

SEQ ID NO: 5414 - protein, 9 aa, Homo sapiens
HRAAWWGKV

SEQ ID NO: 5415 - protein, 10 aa, Homo sapiens
HRMQKEIAAL

SEQ ID NO: 5416 - protein, 9 aa, Homo sapiens
MYPGMAHRM

SEQ ID NO: 5417 - protein, 10 aa, Homo sapiens
DRYGRTALIL

SEQ ID NO: 5418 - protein, 9 aa, Homo sapiens
PRKDLIVML

SEQ ID NO: 5419 - protein, 8 aa, Homo sapiens
RRCQLNVL

SEQ ID NO: 5420 - protein, 9 aa, Homo sapiens
SRTPESQQF

SEQ ID NO: 5421 - protein, 9 aa, Homo sapiens
RCFPCYRES

SEQ ID NO: 5422 - protein, 9 aa, Homo sapiens
LSGQTAREY

SEQ ID NO: 5423 - protein, 9 aa, Homo sapiens
MYPGMAHRM

SEQ ID NO: 5424 - protein, 9 aa, Homo sapiens
DRYGRTALI

SEQ ID NO: 5425 - protein, 10 aa, Homo sapiens
HRMQKEIAAL

SEQ ID NO: 5426 - protein, 9 aa, Homo sapiens
RYGRTALIL

SEQ ID NO: 5427 - protein, 9 aa, Homo sapiens
HHHVICQLL

SEQ ID NO: 5428 - protein, 9 aa, Homo sapiens
PRKDLIVML

SEQ ID NO: 5429 - protein, 9 aa, Homo sapiens
SRTPESQQF

SEQ ID NO: 5430 - protein, 9 aa, Homo sapiens
VAPEEHPIL

SEQ ID NO: 5431 - protein, 9 aa, Homo sapiens
VRGEDLDKL

SEQ ID NO: 5432 - protein, 9 aa, Homo sapiens
NTALHYAIY

SEQ ID NO: 5433 - protein, 11 aa, Homo sapiens
YGNTALHYAIY

SEQ ID NO: 5434 - protein, 10 aa, Homo sapiens
GNTALHYAIY

SEQ ID NO: 5435 - protein, 12 aa, Homo sapiens
EYGNTALHYAIY

SEQ ID NO: 5436 - protein, 9 aa, Homo sapiens
FPDTENEQY

SEQ ID NO: 5437 - protein, 12 aa, Homo sapiens
YGNTALHYAIYN

SEQ ID NO: 5438 - protein, 12 aa, Homo sapiens
IPDEYGNTALHY

SEQ ID NO: 5439 - protein, 12 aa, Homo sapiens
LSDYKEKQMLKV

SEQ ID NO: 5440 - protein, 10 aa, Homo sapiens
NVICQLLSDY

SEQ ID NO: 5441 - protein, 10 aa, Homo sapiens
LSEEQNTGIL

SEQ ID NO: 5442 - protein, 9 aa, Homo sapiens
LSEEQNTGI

SEQ ID NO: 5443 - protein, 9 aa, Homo sapiens
VLQPQPQLF

SEQ ID NO: 5444 - protein, 8 aa, Homo sapiens
LSEEQNTG

SEQ ID NO: 5445 - protein, 11 aa, Homo sapiens
LSEEQNTGILQ

SEQ ID NO: 5446 - protein, 9 aa, Homo sapiens
TADNGDDGL

SEQ ID NO: 5447 - protein, 10 aa, Homo sapiens
QLFFSFFLFI

SEQ ID NO: 5448 - protein, 10 aa, Homo sapiens
QPQLFFSFFL

SEQ ID NO: 5449 - protein, 8 aa, Homo sapiens
QLFFSFFL

SEQ ID NO: 5450 - protein, 10 aa, Homo sapiens
FLFIFIFIFI

SEQ ID NO: 5451 - protein, 11 aa, Homo sapiens
LLLDRRCQLNI

SEQ ID NO: 5452 - protein, 9 aa, Homo sapiens
PQLFFSFFL

SEQ ID NO: 5453 - protein, 12 aa, Homo sapiens
QLFFSFFLFIFI

SEQ ID NO: 5454 - protein, 9 aa, Homo sapiens
FSFFLFIFI

SEQ ID NO: 5455 - protein, 9 aa, Homo sapiens
QLFFSFFLF

SEQ ID NO: 5456 - protein, 8 aa, Homo sapiens
FLFIFIFI

SEQ ID NO: 5457 - protein, 9 aa, Homo sapiens
SLQPRPPEA

SEQ ID NO: 5458 - protein, 10 aa, Homo sapiens
LLDRRCQLNI

SEQ ID NO: 5459 - protein, 12 aa, Homo sapiens
KLLLDRRCQLNI

SEQ ID NO: 5460 - protein, 10 aa, Homo sapiens
MVAEAGSMPA

SEQ ID NO: 5461 - protein, 9 aa, Homo sapiens
GSMPAASSV

SEQ ID NO: 5462 - protein, 11 aa, Homo sapiens
PQLFFSFFLFI

SEQ ID NO: 5463 - protein, 12 aa, Homo sapiens
LLLDRRCQLNIL

SEQ ID NO: 5464 - protein, 9 aa, Homo sapiens
GILQDEILI

SEQ ID NO: 5465 - protein, 12 aa, Homo sapiens
QPQPQLFFSFFL

SEQ ID NO: 5466 - protein, 9 aa, Homo sapiens
YAVSSHHNV

SEQ ID NO: 5467 - protein, 8 aa, Homo sapiens
ILQDEILI

SEQ ID NO: 5468 - protein, 12 aa, Homo sapiens
QPQLFFSFFLFI

SEQ ID NO: 5469 - protein, 9 aa, Homo sapiens
FLFIFIFIF

SEQ ID NO: 5470 - protein, 11 aa, Homo sapiens
FFLFIFIFIFI

SEQ ID NO: 5471 - protein, 10 aa, Homo sapiens
FFSFFLFIFI

SEQ ID NO: 5472 - protein, 9 aa, Homo sapiens
LFFSFFLFI

SEQ ID NO: 5473 - protein, 12 aa, Homo sapiens
SFFLFIFIFIFI

SEQ ID NO: 5474 - protein, 8 aa, Homo sapiens
VLQPQPQL

SEQ ID NO: 5475 - protein, 9 aa, Homo sapiens
ILQDEILIH

SEQ ID NO: 5476 - protein, 9 aa, Homo sapiens
ILDNKKRTA

SEQ ID NO: 5477 - protein, 10 aa, Homo sapiens
ILDNKKRTAL

SEQ ID NO: 5478 - protein, 9 aa, Homo sapiens
VLQPQPQLF

SEQ ID NO: 5479 - protein, 10 aa, Homo sapiens
ILQDEILIHE

SEQ ID NO: 5480 - protein, 10 aa, Homo sapiens
QLSEEQNTGI

SEQ ID NO: 5481 - protein, 9 aa, Homo sapiens
MVLQPQPQL

SEQ ID NO: 5482 - protein, 9 aa, Homo sapiens
THMGFPENL

SEQ ID NO: 5483 - protein, 11 aa, Homo sapiens
ILQDEILIHEE

SEQ ID NO: 5484 - protein, 10 aa, Homo sapiens
SLQPRPPEAQ

SEQ ID NO: 5485 - protein, 10 aa, Homo sapiens
VLQPQPQLFF

SEQ ID NO: 5486 - protein, 9 aa, Homo sapiens
QLSEEQNTG

SEQ ID NO: 5487 - protein, 9 aa, Homo sapiens
GHPNFPTTL

SEQ ID NO: 5488 - protein, 10 aa, Homo sapiens
IPDEYGNTAL

SEQ ID NO: 5489 - protein, 9 aa, Homo sapiens
ALHYAIYNE

SEQ ID NO: 5490 - protein, 9 aa, Homo sapiens
FFLFIFIFI

SEQ ID NO: 5491 - protein, 9 aa, Homo sapiens
IPDEYGNTA

SEQ ID NO: 5492 - protein, 10 aa, Homo sapiens
VMLKDTDMNK

SEQ ID NO: 5493 - protein, 10 aa, Homo sapiens
GSMPAASSVK

SEQ ID NO: 5494 - protein, 9 aa, Homo sapiens
MLKDTDMNK

SEQ ID NO: 5495 - protein, 10 aa, Homo sapiens
MLKDTDMNKK

SEQ ID NO: 5496 - protein, 12 aa, Homo sapiens
KVPRKDLIVMLK

SEQ ID NO: 5497 - protein, 12 aa, Homo sapiens
ILDNKKRTALTK

SEQ ID NO: 5498 - protein, 11 aa, Homo sapiens
ALHYAIYNEDK

SEQ ID NO: 5499 - protein, 11 aa, Homo sapiens
GSMPAASSVKK

SEQ ID NO: 5500 - protein, 11 aa, Homo sapiens
IVMLKDTDMNK

SEQ ID NO: 5501 - protein, 9 aa, Homo sapiens
ILQDEILIH

SEQ ID NO: 5502 - protein, 11 aa, Homo sapiens
HCFPWCRGSGK

SEQ ID NO: 5503 - protein, 10 aa, Homo sapiens
GILQDEILIH

SEQ ID NO: 5504 - protein, 9 aa, Homo sapiens
QLFFSFFLF

SEQ ID NO: 5505 - protein, 10 aa, Homo sapiens
FLFIFIFIFI

SEQ ID NO: 5506 - protein, 10 aa, Homo sapiens
VLQPQPQLFF

SEQ ID NO: 5507 - protein, 10 aa, Homo sapiens
FIFIFIFIFF

SEQ ID NO: 5508 - protein, 9 aa, Homo sapiens
FLFIFIFIF

SEQ ID NO: 5509 - protein, 9 aa, Homo sapiens
SVSQAGVQW

SEQ ID NO: 5510 - protein, 10 aa, Homo sapiens
GSMPAASSVK

SEQ ID NO: 5511 - protein, 9 aa, Homo sapiens
MSQEPEINK

SEQ ID NO: 5512 - protein, 11 aa, Homo sapiens
GSMPAASSVKK

SEQ ID NO: 5513 - protein, 10 aa, Homo sapiens
VMLKDTDMNK

SEQ ID NO: 5514 - protein, 12 aa, Homo sapiens
KVPRKDLIVMLK

SEQ ID NO: 5515 - protein, 12 aa, Homo sapiens
TALHYAIYNEDK

SEQ ID NO: 5516 - protein, 9 aa, Homo sapiens
CQLNILDNK

SEQ ID NO: 5517 - protein, 9 aa, Homo sapiens
MLKDTDMNK

SEQ ID NO: 5518 - protein, 11 aa, Homo sapiens
IVMLKDTDMNK

SEQ ID NO: 5519 - protein, 9 aa, Homo sapiens
SVSQAGVQW

SEQ ID NO: 5520 - protein, 9 aa, Homo sapiens
RKVEEEMKK

SEQ ID NO: 5521 - protein, 9 aa, Homo sapiens
RKDLIVMLK

SEQ ID NO: 5522 - protein, 10 aa, Homo sapiens
GILQDEILIH

SEQ ID NO: 5523 - protein, 9 aa, Homo sapiens
FSFFLFIFI

SEQ ID NO: 5524 - protein, 9 aa, Homo sapiens
PQPQLFFSF

SEQ ID NO: 5525 - protein, 9 aa, Homo sapiens
KWCRHCFPW

SEQ ID NO: 5526 - protein, 9 aa, Homo sapiens
QLFFSFFLF

SEQ ID NO: 5527 - protein, 8 aa, Homo sapiens
LFFSFFLF

SEQ ID NO: 5528 - protein, 10 aa, Homo sapiens
PQLFFSFFLF

SEQ ID NO: 5529 - protein, 10 aa, Homo sapiens
QPQPQLFFSF

SEQ ID NO: 5530 - protein, 9 aa, Homo sapiens
VLQPQPQLF

SEQ ID NO: 5531 - protein, 12 aa, Homo sapiens
VLQPQPQLFFSF

SEQ ID NO: 5532 - protein, 9 aa, Homo sapiens
SFFLFIFIF

SEQ ID NO: 5533 - protein, 10 aa, Homo sapiens
PQPQLFFSFF

SEQ ID NO: 5534 - protein, 9 aa, Homo sapiens
IFIFIFIFF

SEQ ID NO: 5535 - protein, 9 aa, Homo sapiens
FFSFFLFIF

SEQ ID NO: 5536 - protein, 9 aa, Homo sapiens
LFIFIFIFI

SEQ ID NO: 5537 - protein, 10 aa, Homo sapiens
VLQPQPQLFF

SEQ ID NO: 5538 - protein, 10 aa, Homo sapiens
GSMPAASSVK

SEQ ID NO: 5539 - protein, 9 aa, Homo sapiens
HVRREDLDK

SEQ ID NO: 5540 - protein, 9 aa, Homo sapiens
MLKDTDMNK

SEQ ID NO: 5541 - protein, 9 aa, Homo sapiens
GSMPAASSV

SEQ ID NO: 5542 - protein, 9 aa, Homo sapiens
SSKSNVGTS

SEQ ID NO: 5543 - protein, 9 aa, Homo sapiens
STHMGFPEN

SEQ ID NO: 5544 - protein, 10 aa, Homo sapiens
STHMGFPENL

SEQ ID NO: 5545 - protein, 9 aa, Homo sapiens
KNKIESHSV

SEQ ID NO: 5546 - protein, 11 aa, Homo sapiens
RYHVRREDLDK

SEQ ID NO: 5547 - protein, 9 aa, Homo sapiens
RSKMGKWCR

SEQ ID NO: 5548 - protein, 9 aa, Homo sapiens
MSQEPEINK

SEQ ID NO: 5549 - protein, 9 aa, Homo sapiens
MVLQPQPQL

SEQ ID NO: 5550 - protein, 9 aa, Homo sapiens
CQLNILDNK

SEQ ID NO: 5551 - protein, 9 aa, Homo sapiens
KSKVGPWGD

SEQ ID NO: 5552 - protein, 9 aa, Homo sapiens
RDFSGHPNF

SEQ ID NO: 5553 - protein, 9 aa, Homo sapiens
RKVEEEMKK

SEQ ID NO: 5554 - protein, 10 aa, Homo sapiens
FMEPRYHVRR

SEQ ID NO: 5555 - protein, 9 aa, Homo sapiens
RSKMGKWCR

SEQ ID NO: 5556 - protein, 11 aa, Homo sapiens
AFMEPRYHVRR

SEQ ID NO: 5557 - protein, 12 aa, Homo sapiens
SAFMEPRYHVRR

SEQ ID NO: 5558 - protein, 11 aa, Homo sapiens
TLRSKMGKWCR

SEQ ID NO: 5559 - protein, 10 aa, Homo sapiens
CFPWCRGSSK

SEQ ID NO: 5560 - protein, 10 aa, Homo sapiens
WCRHCFPWCR

SEQ ID NO: 5561 - protein, 10 aa, Homo sapiens
LRSKMGKWCR

SEQ ID NO: 5562 - protein, 10 aa, Homo sapiens
CFPWCRGSGK

SEQ ID NO: 5563 - protein, 9 aa, Homo sapiens
DTENEQYHR

SEQ ID NO: 5564 - protein, 8 aa, Homo sapiens
NILDNKKR

SEQ ID NO: 5565 - protein, 10 aa, Homo sapiens
TALTKAVQCR

SEQ ID NO: 5566 - protein, 9 aa, Homo sapiens
MNKKDKQKR

SEQ ID NO: 5567 - protein, 9 aa, Homo sapiens
TALTKAVQC

SEQ ID NO: 5568 - protein, 8 aa, Homo sapiens
EPRYHVRR

SEQ ID NO: 5569 - protein, 9 aa, Homo sapiens
MSQEPEINK

SEQ ID NO: 5570 - protein, 8 aa, Homo sapiens
EINKGGDR

SEQ ID NO: 5571 - protein, 10 aa, Homo sapiens
DMNKKDKQKR

SEQ ID NO: 5572 - protein, 10 aa, Homo sapiens
HPNFPTTLPI

SEQ ID NO: 5573 - protein, 9 aa, Homo sapiens
QPRPPEAQM

SEQ ID NO: 5574 - protein, 10 aa, Homo sapiens
LQPRPPEAQM

SEQ ID NO: 5575 - protein, 9 aa, Homo sapiens
RPPEAQMVL

SEQ ID NO: 5576 - protein, 10 aa, Homo sapiens
IPDEYGNTAL

SEQ ID NO: 5577 - protein, 11 aa, Homo sapiens
QPRPPEAQMVL

SEQ ID NO: 5578 - protein, 8 aa, Homo sapiens
HPNFPTTL

SEQ ID NO: 5579 - protein, 11 aa, Homo sapiens
SLQPRPPEAQM

SEQ ID NO: 5580 - protein, 12 aa, Homo sapiens
SSLQPRPPEAQM

SEQ ID NO: 5581 - protein, 12 aa, Homo sapiens
FPWCRGSSKSNV

SEQ ID NO: 5582 - protein, 10 aa, Homo sapiens
QPRPPEAQMV

SEQ ID NO: 5583 - protein, 9 aa, Homo sapiens
QPQLFFSFF

SEQ ID NO: 5584 - protein, 10 aa, Homo sapiens
QPQPQLFFSF

SEQ ID NO: 5585 - protein, 8 aa, Homo sapiens
QPQPQLFF

SEQ ID NO: 5586 - protein, 10 aa, Homo sapiens
ILDNKKRTAL

SEQ ID NO: 5587 - protein, 12 aa, Homo sapiens
MNKKDKQKRTAL

SEQ ID NO: 5588 - protein, 10 aa, Homo sapiens
EMKKHGSTHM

SEQ ID NO: 5589 - protein, 11 aa, Homo sapiens
NILDNKKRTAL

SEQ ID NO: 5590 - protein, 12 aa, Homo sapiens
LLLDRRCQLNIL

SEQ ID NO: 5591 - protein, 12 aa, Homo sapiens
LNILDNKKRTAL

SEQ ID NO: 5592 - protein, 12 aa, Homo sapiens
FPWCRGSSKSNV

SEQ ID NO: 5593 - protein, 9 aa, Homo sapiens
MGKWCRHCF

SEQ ID NO: 5594 - protein, 9 aa, Homo sapiens
DRRCQLNIL

SEQ ID NO: 5595 - protein, 8 aa, Homo sapiens
HPNFPTTL

SEQ ID NO: 5596 - protein, 9 aa, Homo sapiens
ESKNKIESH

SEQ ID NO: 5597 - protein, 8 aa, Homo sapiens
FIFIFIFF

SEQ ID NO: 5598 - protein, 8 aa, Homo sapiens
EEKQIEVA

SEQ ID NO: 5599 - protein, 8 aa, Homo sapiens
TALTKAVQ

SEQ ID NO: 5600 - protein, 8 aa, Homo sapiens
DEYGNTAL

SEQ ID NO: 5601 - protein, 9 aa, Homo sapiens
FLFIFIFIF

SEQ ID NO: 5602 - protein, 8 aa, Homo sapiens
QPQLFFSF

SEQ ID NO: 5603 - protein, 8 aa, Homo sapiens
HHNVICQL

SEQ ID NO: 5604 - protein, 10 aa, Homo sapiens
HPNFPTTLPI

SEQ ID NO: 5605 - protein, 12 aa, Homo sapiens
REYAVSSHHNVI

SEQ ID NO: 5606 - protein, 10 aa, Homo sapiens
REDECALMLL

SEQ ID NO: 5607 - protein, 9 aa, Homo sapiens
FSFFLFIFI

SEQ ID NO: 5608 - protein, 10 aa, Homo sapiens
QPQLFFSFFL

SEQ ID NO: 5609 - protein, 9 aa, Homo sapiens
LDRRCQLNI

SEQ ID NO: 5610 - protein, 10 aa, Homo sapiens
QLFFSFFLFI

SEQ ID NO: 5611 - protein, 9 aa, Homo sapiens
QLFFSFFLF

SEQ ID NO: 5612 - protein, 11 aa, Homo sapiens
REYAVSSHHNV

SEQ ID NO: 5613 - protein, 9 aa, Homo sapiens
REDECALML

SEQ ID NO: 5614 - protein, 9 aa, Homo sapiens
SQEPEINKG

SEQ ID NO: 5615 - protein, 9 aa, Homo sapiens
KQLSEEQNT

SEQ ID NO: 5616 - protein, 9 aa, Homo sapiens
SQAGVQWCD

SEQ ID NO: 5617 - protein, 9 aa, Homo sapiens
KQIEVAENE

SEQ ID NO: 5618 - protein, 9 aa, Homo sapiens
GILQDEILI

SEQ ID NO: 5619 - protein, 9 aa, Homo sapiens
ADIESKNKI

SEQ ID NO: 5620 - protein, 9 aa, Homo sapiens
AVSSHHNVI

SEQ ID NO: 5621 - protein, 9 aa, Homo sapiens
EQNDTQKQL

SEQ ID NO: 5622 - protein, 8 aa, Homo sapiens
RPPEAQMV

SEQ ID NO: 5623 - protein, 9 aa, Homo sapiens
YAVSSHHNV

SEQ ID NO: 5624 - protein, 9 aa, Homo sapiens
GSMPAASSV

SEQ ID NO: 5625 - protein, 9 aa, Homo sapiens
NTALHYAIY

SEQ ID NO: 5626 - protein, 10 aa, Homo sapiens
YAVSSHHNVI

SEQ ID NO: 5627 - protein, 10 aa, Homo sapiens
MVAEAGSMPA

SEQ ID NO: 5628 - protein, 9 aa, Homo sapiens
VLQPQPQLF

SEQ ID NO: 5629 - protein, 10 aa, Homo sapiens
MVLQPQPQLF

SEQ ID NO: 5630 - protein, 9 aa, Homo sapiens
FSFFLFIFI

SEQ ID NO: 5631 - protein, 9 aa, Homo sapiens
LQPQPQLFF

SEQ ID NO: 5632 - protein, 9 aa, Homo sapiens
ESKNKIESH

SEQ ID NO: 5633 - protein, 10 aa, Homo sapiens
KSKVGPWGDY

SEQ ID NO: 5634 - protein, 9 aa, Homo sapiens
FIFIFIFIF

SEQ ID NO: 5635 - protein, 9 aa, Homo sapiens
FLFIFIFIF

SEQ ID NO: 5636 - protein, 9 aa, Homo sapiens
KSKVGPWGD

SEQ ID NO: 5637 - protein, 9 aa, Homo sapiens
SLQPRPPEA

SEQ ID NO: 5638 - protein, 8 aa, Homo sapiens
MLKVSSEN

SEQ ID NO: 5639 - protein, 8 aa, Homo sapiens
YHRDFSGH

SEQ ID NO: 5640 - protein, 9 aa, Homo sapiens
RPPEAQMVL

SEQ ID NO: 5641 - protein, 9 aa, Homo sapiens
GSMPAASSV

SEQ ID NO: 5642 - protein, 9 aa, Homo sapiens
VLQPQPQLF

SEQ ID NO: 5643 - protein, 11 aa, Homo sapiens
FSGHPNFPTTL

SEQ ID NO: 5644 - protein, 9 aa, Homo sapiens
YAVSSHHNV

SEQ ID NO: 5645 - protein, 9 aa, Homo sapiens
MVLQPQPQL

SEQ ID NO: 5646 - protein, 9 aa, Homo sapiens
AVSSHHNVI

SEQ ID NO: 5647 - protein, 9 aa, Homo sapiens
LQPQPQLFF

SEQ ID NO: 5648 - protein, 10 aa, Homo sapiens
SGHPNFPTTL

SEQ ID NO: 5649 - protein, 9 aa, Homo sapiens
NLPNGATAD

SEQ ID NO: 5650 - protein, 11 aa, Homo sapiens
NIPDEYGNTAL

SEQ ID NO: 5651 - protein, 9 aa, Homo sapiens
GHPNFPTTL

SEQ ID NO: 5652 - protein, 8 aa, Homo sapiens
NLPNGATA

SEQ ID NO: 5653 - protein, 8 aa, Homo sapiens
NFPTTLPI

SEQ ID NO: 5654 - protein, 10 aa, Homo sapiens
NLPNGATADN

SEQ ID NO: 5655 - protein, 8 aa, Homo sapiens
RPPEAQMV

SEQ ID NO: 5656 - protein, 9 aa, Homo sapiens
YAVSSHHNV

SEQ ID NO: 5657 - protein, 9 aa, Homo sapiens
GSMPAASSV

SEQ ID NO: 5658 - protein, 10 aa, Homo sapiens
YAVSSHHNVI

SEQ ID NO: 5659 - protein, 9 aa, Homo sapiens
MVLQPQPQL

SEQ ID NO: 5660 - protein, 9 aa, Homo sapiens
AVSSHHNVI

SEQ ID NO: 5661 - protein, 9 aa, Homo sapiens
IVMLKDTDM

SEQ ID NO: 5662 - protein, 10 aa, Homo sapiens
AGSMPAASSV

SEQ ID NO: 5663 - protein, 9 aa, Homo sapiens
FSFFLFIFI

SEQ ID NO: 5664 - protein, 9 aa, Homo sapiens
RPPEAQMVL

SEQ ID NO: 5665 - protein, 11 aa, Homo sapiens
FSGHPNFPTTL

SEQ ID NO: 5666 - protein, 8 aa, Homo sapiens
FIFIFIFF

SEQ ID NO: 5667 - protein, 9 aa, Homo sapiens
FIFIFIFIF

SEQ ID NO: 5668 - protein, 8 aa, Homo sapiens
FIFIFIFI

SEQ ID NO: 5669 - protein, 9 aa, Homo sapiens
VLQPQPQLF

SEQ ID NO: 5670 - protein, 9 aa, Homo sapiens
HHNVICQLL

SEQ ID NO: 5671 - protein, 9 aa, Homo sapiens
LQPQPQLFF

SEQ ID NO: 5672 - protein, 9 aa, Homo sapiens
REDECALML

SEQ ID NO: 5673 - protein, 9 aa, Homo sapiens
RPPEAQMVL

SEQ ID NO: 5674 - protein, 10 aa, Homo sapiens
HRDFSGHPNF

SEQ ID NO: 5675 - protein, 9 aa, Homo sapiens
CREDECALM

SEQ ID NO: 5676 - protein, 10 aa, Homo sapiens
VLQPQPQLFF

SEQ ID NO: 5677 - protein, 10 aa, Homo sapiens
REDECALMLL

SEQ ID NO: 5678 - protein, 9 aa, Homo sapiens
IFIFIFIFF

SEQ ID NO: 5679 - protein, 9 aa, Homo sapiens
FFSFFLFIF

SEQ ID NO: 5680 - protein, 9 aa, Homo sapiens
SFFLFIFIF

SEQ ID NO: 5681 - protein, 8 aa, Homo sapiens
SFFLFIFI

SEQ ID NO: 5682 - protein, 8 aa, Homo sapiens
FFSFFLFI

SEQ ID NO: 5683 - protein, 8 aa, Homo sapiens
IFIFIFIF

SEQ ID NO: 5684 - protein, 8 aa, Homo sapiens
LFFSFFLF

SEQ ID NO: 5685 - protein, 8 aa, Homo sapiens
FFLFIFIF

SEQ ID NO: 5686 - protein, 9 aa, Homo sapiens
CREDECALM

SEQ ID NO: 5687 - protein, 9 aa, Homo sapiens
HHNVICQLL

SEQ ID NO: 5688 - protein, 9 aa, Homo sapiens
SHHNVICQL

SEQ ID NO: 5689 - protein, 9 aa, Homo sapiens
KRTALTKAV

SEQ ID NO: 5690 - protein, 10 aa, Homo sapiens
HRDFSGHPNF

SEQ ID NO: 5691 - protein, 9 aa, Homo sapiens
THMGFPENL

SEQ ID NO: 5692 - protein, 9 aa, Homo sapiens
DRRCQLNIL

SEQ ID NO: 5693 - protein, 9 aa, Homo sapiens
VRREDLDKL

SEQ ID NO: 5694 - protein, 10 aa, Homo sapiens
SHHNVICQLL

SEQ ID NO: 5695 - protein, 10 aa, Homo sapiens
PRPPEAQMVL

SEQ ID NO: 5696 - protein, 9 aa, Homo sapiens
RPPEAQMVL

SEQ ID NO: 5697 - protein, 9 aa, Homo sapiens
PRYHVRRED

SEQ ID NO: 5698 - protein, 8 aa, Homo sapiens
HPNFPTTL

SEQ ID NO: 5699 - protein, 8 aa, Homo sapiens
LPNGATAD

SEQ ID NO: 5700 - protein, 8 aa, Homo sapiens
RRCQLNIL

SEQ ID NO: 5701 - protein, 8 aa, Homo sapiens
RYHVRRED

SEQ ID NO: 5702 - protein, 9 aa, Homo sapiens
TENEQYHSD

SEQ ID NO: 5703 - protein, 9 aa, Homo sapiens
REDECALML

SEQ ID NO: 5704 - protein, 9 aa, Homo sapiens
SHHNVICQL

SEQ ID NO: 5705 - protein, 9 aa, Homo sapiens
HHNVICQLL

SEQ ID NO: 5706 - protein, 9 aa, Homo sapiens
GHPNFPTTL

SEQ ID NO: 5707 - protein, 9 aa, Homo sapiens
THMGFPENL

SEQ ID NO: 5708 - protein, 9 aa, Homo sapiens
RYHVRREDL

SEQ ID NO: 5709 - protein, 9 aa, Homo sapiens
CREDECALM

SEQ ID NO: 5710 - protein, 9 aa, Homo sapiens
VLQPQPQLF

SEQ ID NO: 5711 - protein, 9 aa, Homo sapiens
KRTALTKAV

SEQ ID NO: 5712 - protein, 10 aa, Homo sapiens
HRDFSGHPNF

SEQ ID NO: 5713 - protein, 10 aa, Homo sapiens
PRPPEAQMVL

SEQ ID NO: 5714 - protein, 9 aa, Homo sapiens
VRREDLDKL

SEQ ID NO: 5715 - protein, 8 aa, Homo sapiens
PRPPEAQM

SEQ ID NO: 5716 - protein, 9 aa, Homo sapiens
EYGNTALHY

SEQ ID NO: 5717 - protein, 9 aa, Homo sapiens
RPPEAQMVL

SEQ ID NO: 5718 - protein, 9 aa, Homo sapiens
FIFIFIFIF

SEQ ID NO: 5719 - protein, 8 aa, Homo sapiens
RREDLDKL

SEQ ID NO: 5720 - protein, 9 aa, Homo sapiens
FLFIFIFIF

SEQ ID NO: 5721 - protein, 12 aa, Homo sapiens
LSDYKEKQILKV

SEQ ID NO: 5722 - protein, 9 aa, Homo sapiens
LSDYKEKQI

SEQ ID NO: 5723 - protein, 11 aa, Homo sapiens
LSDYKEKQILK

SEQ ID NO: 5724 - protein, 10 aa, Homo sapiens
LSDYKEKQIL

SEQ ID NO: 5725 - protein, 12 aa, Homo sapiens
RHNVICQLLSDY

SEQ ID NO: 5726 - protein, 12 aa, Homo sapiens
LLSDYKEKQILK

SEQ ID NO: 5727 - protein, 10 aa, Homo sapiens
LLSDYKEKQI

SEQ ID NO: 5728 - protein, 12 aa, Homo sapiens
VSSRHNVICQLL

SEQ ID NO: 5729 - protein, 10 aa, Homo sapiens
MGKWCRHCFA

SEQ ID NO: 5730 - protein, 9 aa, Homo sapiens
FAWCRGSGK

SEQ ID NO: 5731 - protein, 9 aa, Homo sapiens
YKEKQILKV

SEQ ID NO: 5732 - protein, 8 aa, Homo sapiens
YKEKQILK

SEQ ID NO: 5733 - protein, 9 aa, Homo sapiens
LTNGATADN

SEQ ID NO: 5734 - protein, 8 aa, Homo sapiens
LTNGATAD

SEQ ID NO: 5735 - protein, 9 aa, Homo sapiens
VSSRHNVIC

SEQ ID NO: 5736 - protein, 10 aa, Homo sapiens
LLSDYKEKQI

SEQ ID NO: 5737 - protein, 11 aa, Homo sapiens
KMGKWCRHCFA

SEQ ID NO: 5738 - protein, 12 aa, Homo sapiens
FAWCRGSGKSNV

SEQ ID NO: 5739 - protein, 9 aa, Homo sapiens
YAVSSRHNV

SEQ ID NO: 5740 - protein, 12 aa, Homo sapiens
SKMGKWCRHCFA

SEQ ID NO: 5741 - protein, 10 aa, Homo sapiens
MGKWCRHCFA

SEQ ID NO: 5742 - protein, 11 aa, Homo sapiens
LLSDYKEKQIL

SEQ ID NO: 5743 - protein, 12 aa, Homo sapiens
KMGKWCRHCFAW

SEQ ID NO: 5744 - protein, 9 aa, Homo sapiens
HMGFPENLT

SEQ ID NO: 5745 - protein, 12 aa, Homo sapiens
QLLSDYKEKQIL

SEQ ID NO: 5746 - protein, 11 aa, Homo sapiens
QLLSDYKEKQI

SEQ ID NO: 5747 - protein, 12 aa, Homo sapiens
CQLLSDYKEKQI

SEQ ID NO: 5748 - protein, 9 aa, Homo sapiens
FAWCRGSGK

SEQ ID NO: 5749 - protein, 12 aa, Homo sapiens
KMGKWCCHCFPW

SEQ ID NO: 5750 - protein, 12 aa, Homo sapiens
AVSSRHNVICQL

SEQ ID NO: 5751 - protein, 9 aa, Homo sapiens
GKWCRHCFA

SEQ ID NO: 5752 - protein, 9 aa, Homo sapiens
AVSSRHNVI

SEQ ID NO: 5753 - protein, 10 aa, Homo sapiens
FAWCRGSGKS

SEQ ID NO: 5754 - protein, 12 aa, Homo sapiens
HMGFPENLTNGA

SEQ ID NO: 5755 - protein, 10 aa, Homo sapiens
THMGFPENLT

SEQ ID NO: 5756 - protein, 10 aa, Homo sapiens
YAVSSRHNVI

SEQ ID NO: 5757 - protein, 12 aa, Homo sapiens
LLSDYKEKQILK

SEQ ID NO: 5758 - protein, 10 aa, Homo sapiens
KWCCHCFPWC

SEQ ID NO: 5759 - protein, 10 aa, Homo sapiens
GKWCCHCFPW

SEQ ID NO: 5760 - protein, 10 aa, Homo sapiens
HMGFPENLTN

SEQ ID NO: 5761 - protein, 9 aa, Homo sapiens
KQILKVSSE

SEQ ID NO: 5762 - protein, 9 aa, Homo sapiens
KWCCHCFPW

SEQ ID NO: 5763 - protein, 9 aa, Homo sapiens
YKEKQILKV

SEQ ID NO: 5764 - protein, 9 aa, Homo sapiens
SRHNVICQL

SEQ ID NO: 5765 - protein, 9 aa, Homo sapiens
ALTKAVQCQ

SEQ ID NO: 5766 - protein, 9 aa, Homo sapiens
NLTNGATAD

SEQ ID NO: 5767 - protein, 8 aa, Homo sapiens
AVSSRHNV

SEQ ID NO: 5768 - protein, 11 aa, Homo sapiens
SDYKEKQILKV

SEQ ID NO: 5769 - protein, 9 aa, Homo sapiens
SDYKEKQIL

SEQ ID NO: 5770 - protein, 9 aa, Homo sapiens
CRGSGKNKV

SEQ ID NO: 5771 - protein, 10 aa, Homo sapiens
DYKEKQILKV

SEQ ID NO: 5772 - protein, 9 aa, Homo sapiens
ILKVSSENS

SEQ ID NO: 5773 - protein, 9 aa, Homo sapiens
MGFPENLTN

SEQ ID NO: 5774 - protein, 10 aa, Homo sapiens
ALTKAVQCQE

SEQ ID NO: 5775 - protein, 9 aa, Homo sapiens
RHNVICQLL

SEQ ID NO: 5776 - protein, 10 aa, Homo sapiens
NLTNGATADN

SEQ ID NO: 5777 - protein, 9 aa, Homo sapiens
QILKVSSEN

SEQ ID NO: 5778 - protein, 10 aa, Homo sapiens
SRHNVICQLL

SEQ ID NO: 5779 - protein, 8 aa, Homo sapiens
KEKQILKV

SEQ ID NO: 5780 - protein, 9 aa, Homo sapiens
LSDYKEKQI

SEQ ID NO: 5781 - protein, 9 aa, Homo sapiens
FAWCRGSGK

SEQ ID NO: 5782 - protein, 10 aa, Homo sapiens
CFAWCRGSGK

SEQ ID NO: 5783 - protein, 12 aa, Homo sapiens
LLSDYKEKQILK

SEQ ID NO: 5784 - protein, 12 aa, Homo sapiens
RHCFAWCRGSGK

SEQ ID NO: 5785 - protein, 11 aa, Homo sapiens
HCFAWCRGSGK

SEQ ID NO: 5786 - protein, 10 aa, Homo sapiens
FAWCRGSGKS

SEQ ID NO: 5787 - protein, 11 aa, Homo sapiens
LSDYKEKQILK

SEQ ID NO: 5788 - protein, 10 aa, Homo sapiens
SDYKEKQILK

SEQ ID NO: 5789 - protein, 10 aa, Homo sapiens
TAREYAVSSR

SEQ ID NO: 5790 - protein, 9 aa, Homo sapiens
REYAVSSRH

SEQ ID NO: 5791 - protein, 9 aa, Homo sapiens
DYKEKQILK

SEQ ID NO: 5792 - protein, 10 aa, Homo sapiens
AVSSRHNVIC

SEQ ID NO: 5793 - protein, 8 aa, Homo sapiens
REYAVSSR

SEQ ID NO: 5794 - protein, 9 aa, Homo sapiens
CCRGSGKNK

SEQ ID NO: 5795 - protein, 9 aa, Homo sapiens
FAWCRGSGK

SEQ ID NO: 5796 - protein, 12 aa, Homo sapiens
LLSDYKEKQILK

SEQ ID NO: 5797 - protein, 10 aa, Homo sapiens
CFAWCRGSGK

SEQ ID NO: 5798 - protein, 11 aa, Homo sapiens
LSDYKEKQILK

SEQ ID NO: 5799 - protein, 10 aa, Homo sapiens
SDYKEKQILK

SEQ ID NO: 5800 - protein, 12 aa, Homo sapiens
RHCFAWCRGSGK

SEQ ID NO: 5801 - protein, 11 aa, Homo sapiens
QTAREYAVSSR

SEQ ID NO: 5802 - protein, 10 aa, Homo sapiens
TAREYAVSSR

SEQ ID NO: 5803 - protein, 11 aa, Homo sapiens
HCFAWCRGSGK

SEQ ID NO: 5804 - protein, 9 aa, Homo sapiens
DYKEKQILK

SEQ ID NO: 5805 - protein, 9 aa, Homo sapiens
AVSSRHNVI

SEQ ID NO: 5806 - protein, 10 aa, Homo sapiens
AVSSRHNVIC

SEQ ID NO: 5807 - protein, 9 aa, Homo sapiens
CCRGSGKNK

SEQ ID NO: 5808 - protein, 9 aa, Homo sapiens
AREYAVSSR

SEQ ID NO: 5809 - protein, 9 aa, Homo sapiens
MGFPENLTN

SEQ ID NO: 5810 - protein, 9 aa, Homo sapiens
KWCCHCFPW

SEQ ID NO: 5811 - protein, 9 aa, Homo sapiens
KWCRHCFAW

SEQ ID NO: 5812 - protein, 10 aa, Homo sapiens
GKWCCHCFPW

SEQ ID NO: 5813 - protein, 12 aa, Homo sapiens
KMGKWCCHCFPW

SEQ ID NO: 5814 - protein, 11 aa, Homo sapiens
MGKWCCHCFPW

SEQ ID NO: 5815 - protein, 10 aa, Homo sapiens
GKWCRHCFAW

SEQ ID NO: 5816 - protein, 9 aa, Homo sapiens
RHNVICQLL

SEQ ID NO: 5817 - protein, 11 aa, Homo sapiens
MGKWCRHCFAW

SEQ ID NO: 5818 - protein, 12 aa, Homo sapiens
KMGKWCRHCFAW

SEQ ID NO: 5819 - protein, 9 aa, Homo sapiens
DYKEKQILK

SEQ ID NO: 5820 - protein, 8 aa, Homo sapiens
DYKEKQIL

SEQ ID NO: 5821 - protein, 9 aa, Homo sapiens
EYAVSSRHN

SEQ ID NO: 5822 - protein, 11 aa, Homo sapiens
EYAVSSRHNVI

SEQ ID NO: 5823 - protein, 10 aa, Homo sapiens
EYAVSSRHNV

SEQ ID NO: 5824 - protein, 10 aa, Homo sapiens
DYKEKQILKV

SEQ ID NO: 5825 - protein, 9 aa, Homo sapiens
AVSSRHNVI

SEQ ID NO: 5826 - protein, 10 aa, Homo sapiens
MGKWCRHCFA

SEQ ID NO: 5827 - protein, 10 aa, Homo sapiens
SSRHNVICQL

SEQ ID NO: 5828 - protein, 9 aa, Homo sapiens
SSRHNVICQ

SEQ ID NO: 5829 - protein, 10 aa, Homo sapiens
SDYKEKQILK

SEQ ID NO: 5830 - protein, 11 aa, Homo sapiens
KMGKWCRHCFA

SEQ ID NO: 5831 - protein, 9 aa, Homo sapiens
AVSSRHNVI

SEQ ID NO: 5832 - protein, 12 aa, Homo sapiens
RHCFAWCRGSGK

SEQ ID NO: 5833 - protein, 9 aa, Homo sapiens
CCRGSGKNK

SEQ ID NO: 5834 - protein, 10 aa, Homo sapiens
KWCRHCFAWC

SEQ ID NO: 5835 - protein, 9 aa, Homo sapiens
DYKEKQILK

SEQ ID NO: 5836 - protein, 10 aa, Homo sapiens
DYKEKQILKV

SEQ ID NO: 5837 - protein, 9 aa, Homo sapiens
SRHNVICQL

SEQ ID NO: 5838 - protein, 8 aa, Homo sapiens
KEKQILKV

SEQ ID NO: 5839 - protein, 9 aa, Homo sapiens
KNKVGPWGD

SEQ ID NO: 5840 - protein, 8 aa, Homo sapiens
AVSSRHNV

SEQ ID NO: 5841 - protein, 10 aa, Homo sapiens
TAREYAVSSR

SEQ ID NO: 5842 - protein, 10 aa, Homo sapiens
CFAWCRGSGK

SEQ ID NO: 5843 - protein, 10 aa, Homo sapiens
WCRHCFAWCR

SEQ ID NO: 5844 - protein, 9 aa, Homo sapiens
FAWCRGSGK

SEQ ID NO: 5845 - protein, 9 aa, Homo sapiens
CCHCFPWCR

SEQ ID NO: 5846 - protein, 9 aa, Homo sapiens
DYKEKQILK

SEQ ID NO: 5847 - protein, 10 aa, Homo sapiens
WCCHCFPWCR

SEQ ID NO: 5848 - protein, 9 aa, Homo sapiens
CRHCFAWCR

SEQ ID NO: 5849 - protein, 11 aa, Homo sapiens
QTAREYAVSSR

SEQ ID NO: 5850 - protein, 9 aa, Homo sapiens
EYAVSSRHN

SEQ ID NO: 5851 - protein, 10 aa, Homo sapiens
EYAVSSRHNV

SEQ ID NO: 5852 - protein, 10 aa, Homo sapiens
DYKEKQILKV

SEQ ID NO: 5853 - protein, 8 aa, Homo sapiens
EYAVSSRH

SEQ ID NO: 5854 - protein, 10 aa, Homo sapiens
ENLTNGATAD

SEQ ID NO: 5855 - protein, 9 aa, Homo sapiens
AVSSRHNVI

SEQ ID NO: 5856 - protein, 9 aa, Homo sapiens
YAVSSRHNV

SEQ ID NO: 5857 - protein, 10 aa, Homo sapiens
YAVSSRHNVI

SEQ ID NO: 5858 - protein, 10 aa, Homo sapiens
SSRHNVICQL

SEQ ID NO: 5859 - protein, 12 aa, Homo sapiens
FPCCRGSGKNKV

SEQ ID NO: 5860 - protein, 9 aa, Homo sapiens
FAWCRGSGK

SEQ ID NO: 5861 - protein, 12 aa, Homo sapiens
FPENLTNGATAD

SEQ ID NO: 5862 - protein, 12 aa, Homo sapiens
MGFPENLTNGAT

SEQ ID NO: 5863 - protein, 12 aa, Homo sapiens
REYAVSSRHNVI

SEQ ID NO: 5864 - protein, 9 aa, Homo sapiens
RHNVICQLL

SEQ ID NO: 5865 - protein, 9 aa, Homo sapiens
SDYKEKQIL

SEQ ID NO: 5866 - protein, 9 aa, Homo sapiens
SRHNVICQL

SEQ ID NO: 5867 - protein, 8 aa, Homo sapiens
AVSSRHNV

SEQ ID NO: 5868 - protein, 8 aa, Homo sapiens
RHNVICQL

SEQ ID NO: 5869 - protein, 10 aa, Homo sapiens
FPCCRGSGKN

SEQ ID NO: 5870 - protein, 10 aa, Homo sapiens
MGKWCRHCFA

SEQ ID NO: 5871 - protein, 10 aa, Homo sapiens
YAVSSRHNVI

SEQ ID NO: 5872 - protein, 9 aa, Homo sapiens
AVSSRHNVI

SEQ ID NO: 5873 - protein, 12 aa, Homo sapiens
FAWCRGSGKSNV

SEQ ID NO: 5874 - protein, 11 aa, Homo sapiens
KMGKWCRHCFA

SEQ ID NO: 5875 - protein, 12 aa, Homo sapiens
SKMGKWCRHCFA

SEQ ID NO: 5876 - protein, 8 aa, Homo sapiens
FAWCRGSG

SEQ ID NO: 5877 - protein, 12 aa, Homo sapiens
FPCCRGSGKNKV

SEQ ID NO: 5878 - protein, 10 aa, Homo sapiens
SSRHNVICQL

SEQ ID NO: 5879 - protein, 8 aa, Homo sapiens
DYKEKQIL

SEQ ID NO: 5880 - protein, 10 aa, Homo sapiens
DYKEKQILKV

SEQ ID NO: 5881 - protein, 9 aa, Homo sapiens
SDYKEKQIL

SEQ ID NO: 5882 - protein, 8 aa, Homo sapiens
SGKNKVGP

SEQ ID NO: 5883 - protein, 9 aa, Homo sapiens
DYKEKQILK

SEQ ID NO: 5884 - protein, 8 aa, Homo sapiens
KEKQILKV

SEQ ID NO: 5885 - protein, 8 aa, Homo sapiens
QILKVSSE

SEQ ID NO: 5886 - protein, 11 aa, Homo sapiens
LLSDYKEKQIL

SEQ ID NO: 5887 - protein, 12 aa, Homo sapiens
REYAVSSRHNVI

SEQ ID NO: 5888 - protein, 11 aa, Homo sapiens
REYAVSSRHNV

SEQ ID NO: 5889 - protein, 12 aa, Homo sapiens
CQLLSDYKEKQI

SEQ ID NO: 5890 - protein, 10 aa, Homo sapiens
GKWCCHCFPW

SEQ ID NO: 5891 - protein, 12 aa, Homo sapiens
AREYAVSSRHNV

SEQ ID NO: 5892 - protein, 11 aa, Homo sapiens
SDYKEKQILKV

SEQ ID NO: 5893 - protein, 9 aa, Homo sapiens
YAVSSRHNV

SEQ ID NO: 5894 - protein, 10 aa, Homo sapiens
GKWCRHCFAW

SEQ ID NO: 5895 - protein, 10 aa, Homo sapiens
YAVSSRHNVI

SEQ ID NO: 5896 - protein, 8 aa, Homo sapiens
KEKQILKV

SEQ ID NO: 5897 - protein, 9 aa, Homo sapiens
YKEKQILKV

SEQ ID NO: 5898 - protein, 9 aa, Homo sapiens
AVSSRHNVI

SEQ ID NO: 5899 - protein, 8 aa, Homo sapiens
RGSGKNKV

SEQ ID NO: 5900 - protein, 9 aa, Homo sapiens
SDYKEKQIL

SEQ ID NO: 5901 - protein, 9 aa, Homo sapiens
RHNVICQLL

SEQ ID NO: 5902 - protein, 9 aa, Homo sapiens
ALTKAVQCQ

SEQ ID NO: 5903 - protein, 9 aa, Homo sapiens
KQILKVSSE

SEQ ID NO: 5904 - protein, 8 aa, Homo sapiens
AVSSRHNV

SEQ ID NO: 5905 - protein, 9 aa, Homo sapiens
YAVSSRHNV

SEQ ID NO: 5906 - protein, 10 aa, Homo sapiens
YAVSSRHNVI

SEQ ID NO: 5907 - protein, 9 aa, Homo sapiens
FAWCRGSGK

SEQ ID NO: 5908 - protein, 10 aa, Homo sapiens
SSRHNVICQL

SEQ ID NO: 5909 - protein, 9 aa, Homo sapiens
AVSSRHNVI

SEQ ID NO: 5910 - protein, 9 aa, Homo sapiens
SGKNKVGPW

SEQ ID NO: 5911 - protein, 12 aa, Homo sapiens
FAWCRGSGKSNV

SEQ ID NO: 5912 - protein, 9 aa, Homo sapiens
SRHNVICQL

SEQ ID NO: 5913 - protein, 10 aa, Homo sapiens
FAWCRGSGKS

SEQ ID NO: 5914 - protein, 8 aa, Homo sapiens
ILKVSSEN

SEQ ID NO: 5915 - protein, 10 aa, Homo sapiens
KNKVGPWGDY

SEQ ID NO: 5916 - protein, 9 aa, Homo sapiens
NLTNGATAD

SEQ ID NO: 5917 - protein, 8 aa, Homo sapiens
YAVSSRHN

SEQ ID NO: 5918 - protein, 9 aa, Homo sapiens
KQILKVSSE

SEQ ID NO: 5919 - protein, 9 aa, Homo sapiens
ILKVSSENS

SEQ ID NO: 5920 - protein, 9 aa, Homo sapiens
YAVSSRHNV

SEQ ID NO: 5921 - protein, 9 aa, Homo sapiens
AVSSRHNVI

SEQ ID NO: 5922 - protein, 10 aa, Homo sapiens
YAVSSRHNVI

SEQ ID NO: 5923 - protein, 9 aa, Homo sapiens
RHNVICQLL

SEQ ID NO: 5924 - protein, 9 aa, Homo sapiens
LSDYKEKQI

SEQ ID NO: 5925 - protein, 10 aa, Homo sapiens
SSRHNVICQL

SEQ ID NO: 5926 - protein, 9 aa, Homo sapiens
SRHNVICQL

SEQ ID NO: 5927 - protein, 9 aa, Homo sapiens
FAWCRGSGK

SEQ ID NO: 5928 - protein, 10 aa, Homo sapiens
LSDYKEKQIL

SEQ ID NO: 5929 - protein, 9 aa, Homo sapiens
NLTNGATAD

SEQ ID NO: 5930 - protein, 8 aa, Homo sapiens
VSSRHNVI

SEQ ID NO: 5931 - protein, 8 aa, Homo sapiens
RHNVICQL

SEQ ID NO: 5932 - protein, 8 aa, Homo sapiens
ILKVSSEN

SEQ ID NO: 5933 - protein, 9 aa, Homo sapiens
YAVSSRHNV

SEQ ID NO: 5934 - protein, 10 aa, Homo sapiens
YAVSSRHNVI

SEQ ID NO: 5935 - protein, 9 aa, Homo sapiens
AVSSRHNVI

SEQ ID NO: 5936 - protein, 12 aa, Homo sapiens
FAWCRGSGKSNV

SEQ ID NO: 5937 - protein, 9 aa, Homo sapiens
FAWCRGSGK

SEQ ID NO: 5938 - protein, 11 aa, Homo sapiens
EYAVSSRHNVI

SEQ ID NO: 5939 - protein, 10 aa, Homo sapiens
EYAVSSRHNV

SEQ ID NO: 5940 - protein, 9 aa, Homo sapiens
RHNVICQLL

SEQ ID NO: 5941 - protein, 12 aa, Homo sapiens
REYAVSSRHNVI

SEQ ID NO: 5942 - protein, 8 aa, Homo sapiens
YAVSSRHN

SEQ ID NO: 5943 - protein, 9 aa, Homo sapiens
SRHNVICQL

SEQ ID NO: 5944 - protein, 10 aa, Homo sapiens
LSDYKEKQIL

SEQ ID NO: 5945 - protein, 8 aa, Homo sapiens
FAWCRGSG

SEQ ID NO: 5946 - protein, 9 aa, Homo sapiens
MGFPENLTN

SEQ ID NO: 5947 - protein, 9 aa, Homo sapiens
SDYKEKQIL

SEQ ID NO: 5948 - protein, 9 aa, Homo sapiens
RHNVICQLL

SEQ ID NO: 5949 - protein, 9 aa, Homo sapiens
FAWCRGSGK

SEQ ID NO: 5950 - protein, 9 aa, Homo sapiens
SRHNVICQL

SEQ ID NO: 5951 - protein, 10 aa, Homo sapiens
SRHNVICQLL

SEQ ID NO: 5952 - protein, 10 aa, Homo sapiens
CFAWCRGSGK

SEQ ID NO: 5953 - protein, 9 aa, Homo sapiens
YAVSSRHNV

SEQ ID NO: 5954 - protein, 9 aa, Homo sapiens
AVSSRHNVI

SEQ ID NO: 5955 - protein, 10 aa, Homo sapiens
YAVSSRHNVI

SEQ ID NO: 5956 - protein, 10 aa, Homo sapiens
MGKWCRHCFA

SEQ ID NO: 5957 - protein, 8 aa, Homo sapiens
DYKEKQIL

SEQ ID NO: 5958 - protein, 8 aa, Homo sapiens
RHNVICQL

SEQ ID NO: 5959 - protein, 9 aa, Homo sapiens
LSDYKEKQI

SEQ ID NO: 5960 - protein, 10 aa, Homo sapiens
LSDYKEKQIL

SEQ ID NO: 5961 - protein, 9 aa, Homo sapiens
YKEKQILKV

SEQ ID NO: 5962 - protein, 9 aa, Homo sapiens
LTNGATADN

SEQ ID NO: 5963 - protein, 8 aa, Homo sapiens
LTNGATAD

SEQ ID NO: 5964 - protein, 9 aa, Homo sapiens
SRHNVICQL

SEQ ID NO: 5965 - protein, 10 aa, Homo sapiens
SRHNVICQLL

SEQ ID NO: 5966 - protein, 10 aa, Homo sapiens
SSRHNVICQL

SEQ ID NO: 5967 - protein, 9 aa, Homo sapiens
RHNVICQLL

SEQ ID NO: 5968 - protein, 9 aa, Homo sapiens
YAVSSRHNV

SEQ ID NO: 5969 - protein, 9 aa, Homo sapiens
YKEKQILKV

SEQ ID NO: 5970 - protein, 11 aa, Homo sapiens
SSRHNVICQLL

SEQ ID NO: 5971 - protein, 9 aa, Homo sapiens
CRGSGKNKV

SEQ ID NO: 5972 - protein, 9 aa, Homo sapiens
AVSSRHNVI

SEQ ID NO: 5973 - protein, 9 aa, Homo sapiens
SDYKEKQIL

SEQ ID NO: 5974 - protein, 8 aa, Homo sapiens
LTNGATAD

SEQ ID NO: 5975 - protein, 8 aa, Homo sapiens
DYKEKQIL

SEQ ID NO: 5976 - protein, 9 aa, Homo sapiens
GSGKNKVGP

SEQ ID NO: 5977 - protein, 10 aa, Homo sapiens
LSDYKEKQIL

SEQ ID NO: 5978 - protein, 9 aa, Homo sapiens
KNKVGPWGD

SEQ ID NO: 5979 - protein, 8 aa, Homo sapiens
RHNVICQL

SEQ ID NO: 5980 - protein, 9 aa, Homo sapiens
HCFAWCRGS

SEQ ID NO: 5981 - protein, 9 aa, Homo sapiens
SRHNVICQL

SEQ ID NO: 5982 - protein, 10 aa, Homo sapiens
SRHNVICQLL

SEQ ID NO: 5983 - protein, 9 aa, Homo sapiens
RHNVICQLL

SEQ ID NO: 5984 - protein, 10 aa, Homo sapiens
SSRHNVICQL

SEQ ID NO: 5985 - protein, 9 aa, Homo sapiens
YAVSSRHNV

SEQ ID NO: 5986 - protein, 11 aa, Homo sapiens
SSRHNVICQLL

SEQ ID NO: 5987 - protein, 9 aa, Homo sapiens
AVSSRHNVI

SEQ ID NO: 5988 - protein, 9 aa, Homo sapiens
YKEKQILKV

SEQ ID NO: 5989 - protein, 9 aa, Homo sapiens
CRHCFAWCR

SEQ ID NO: 5990 - protein, 8 aa, Homo sapiens
DYKEKQIL

SEQ ID NO: 5991 - protein, 9 aa, Homo sapiens
NKVGPWGDY

SEQ ID NO: 5992 - protein, 8 aa, Homo sapiens
SRHNVICQ

SEQ ID NO: 5993 - protein, 9 aa, Homo sapiens
AREYAVSSR

SEQ ID NO: 5994 - protein, 9 aa, Homo sapiens
SDYKEKQIL

SEQ ID NO: 5995 - protein, 8 aa, Homo sapiens
RHNVICQL

SEQ ID NO: 5996 - protein, 9 aa, Homo sapiens
STGEKGFRY

SEQ ID NO: 5997 - protein, 10 aa, Homo sapiens
IVEAMEHFGY

SEQ ID NO: 5998 - protein, 10 aa, Homo sapiens
LSTGEKGFRY

SEQ ID NO: 5999 - protein, 9 aa, Homo sapiens
SVIFFDITV

SEQ ID NO: 6000 - protein, 10 aa, Homo sapiens
MVNSVIFFDI

SEQ ID NO: 6001 - protein, 10 aa, Homo sapiens
NSVIFFDITV

SEQ ID NO: 6002 - protein, 12 aa, Homo sapiens
MVNSVIFFDITV

SEQ ID NO: 6003 - protein, 10 aa, Homo sapiens
SVIFFDITVD

SEQ ID NO: 6004 - protein, 9 aa, Homo sapiens
WLDGKHVAF

SEQ ID NO: 6005 - protein, 12 aa, Homo sapiens
WLDGKHVAFGKV

SEQ ID NO: 6006 - protein, 8 aa, Homo sapiens
VIFFDITV

SEQ ID NO: 6007 - protein, 11 aa, Homo sapiens
VNSVIFFDITV

SEQ ID NO: 6008 - protein, 9 aa, Homo sapiens
KVKERVNIV

SEQ ID NO: 6009 - protein, 8 aa, Homo sapiens
WLDGKHVA

SEQ ID NO: 6010 - protein, 9 aa, Homo sapiens
FADKIPKTA

SEQ ID NO: 6011 - protein, 9 aa, Homo sapiens
FDDENLIRK

SEQ ID NO: 6012 - protein, 10 aa, Homo sapiens
WLDGKHVAFG

SEQ ID NO: 6013 - protein, 9 aa, Homo sapiens
EWLDGKHVA

SEQ ID NO: 6014 - protein, 10 aa, Homo sapiens
RISIKQFADK

SEQ ID NO: 6015 - protein, 11 aa, Homo sapiens
AMEHFGYRNSK

SEQ ID NO: 6016 - protein, 12 aa, Homo sapiens
ALSTGEKGFRYK

SEQ ID NO: 6017 - protein, 9 aa, Homo sapiens
KQFADKIPK

SEQ ID NO: 6018 - protein, 10 aa, Homo sapiens
STGEKGFRYK

SEQ ID NO: 6019 - protein, 10 aa, Homo sapiens
STGEKGFRYK

SEQ ID NO: 6020 - protein, 12 aa, Homo sapiens
SVIFFDITVDGK

SEQ ID NO: 6021 - protein, 9 aa, Homo sapiens
ISIKQFADK

SEQ ID NO: 6022 - protein, 10 aa, Homo sapiens
ITVDGKPLGR

SEQ ID NO: 6023 - protein, 9 aa, Homo sapiens
TVDGKPLGR

SEQ ID NO: 6024 - protein, 10 aa, Homo sapiens
RYKGSCFHRI

SEQ ID NO: 6025 - protein, 11 aa, Homo sapiens
RYKGSCFHRII

SEQ ID NO: 6026 - protein, 11 aa, Homo sapiens
FRYKGSCFHRI

SEQ ID NO: 6027 - protein, 10 aa, Homo sapiens
EWLDGKHVAF

SEQ ID NO: 6028 - protein, 9 aa, Homo sapiens
KIPKTAENF

SEQ ID NO: 6029 - protein, 9 aa, Homo sapiens
KVKERVNIV

SEQ ID NO: 6030 - protein, 9 aa, Homo sapiens
GYRNSKTSK

SEQ ID NO: 6031 - protein, 9 aa, Homo sapiens
KQFADKIPK

SEQ ID NO: 6032 - protein, 10 aa, Homo sapiens
STGEKGFRYK

SEQ ID NO: 6033 - protein, 9 aa, Homo sapiens
EAMEHFGYR

SEQ ID NO: 6034 - protein, 10 aa, Homo sapiens
VEAMEHFGYR

SEQ ID NO: 6035 - protein, 10 aa, Homo sapiens
FRYKGSCFHR

SEQ ID NO: 6036 - protein, 9 aa, Homo sapiens
VAFGKVKER

SEQ ID NO: 6037 - protein, 9 aa, Homo sapiens
TVDGKPLGR

SEQ ID NO: 6038 - protein, 11 aa, Homo sapiens
IPKTAENFRAL

SEQ ID NO: 6039 - protein, 8 aa, Homo sapiens
KPLGRISI

SEQ ID NO: 6040 - protein, 10 aa, Homo sapiens
HPNGTGDKSI

SEQ ID NO: 6041 - protein, 9 aa, Homo sapiens
KPLGRISIK

SEQ ID NO: 6042 - protein, 10 aa, Homo sapiens
FGKVKERVNI

SEQ ID NO: 6043 - protein, 10 aa, Homo sapiens
LIRKHTGSGI

SEQ ID NO: 6044 - protein, 9 aa, Homo sapiens
KVKERVNIV

SEQ ID NO: 6045 - protein, 9 aa, Homo sapiens
ENLIRKHTG

SEQ ID NO: 6046 - protein, 9 aa, Homo sapiens
WLDGKHVAF

SEQ ID NO: 6047 - protein, 10 aa, Homo sapiens
MVNSVIFFDI

SEQ ID NO: 6048 - protein, 9 aa, Homo sapiens
VNSVIFFDI

SEQ ID NO: 6049 - protein, 9 aa, Homo sapiens
SVIFFDITV

SEQ ID NO: 6050 - protein, 9 aa, Homo sapiens
RNSKTSKKI

SEQ ID NO: 6051 - protein, 9 aa, Homo sapiens
AFGKVKERV

SEQ ID NO: 6052 - protein, 9 aa, Homo sapiens
ITIADCGQF

SEQ ID NO: 6053 - protein, 9 aa, Homo sapiens
HTGSGILSM

SEQ ID NO: 6054 - protein, 9 aa, Homo sapiens
NIVEAMEHF

SEQ ID NO: 6055 - protein, 9 aa, Homo sapiens
VIFFDITVD

SEQ ID NO: 6056 - protein, 9 aa, Homo sapiens
STGEKGFRY

SEQ ID NO: 6057 - protein, 9 aa, Homo sapiens
WLDGKHVAF

SEQ ID NO: 6058 - protein, 9 aa, Homo sapiens
WLDGKHVAF

SEQ ID NO: 6059 - protein, 9 aa, Homo sapiens
HTGSGILSM

SEQ ID NO: 6060 - protein, 9 aa, Homo sapiens
KIPKTAENF

SEQ ID NO: 6061 - protein, 12 aa, Homo sapiens
KIPKTAENFRAL

SEQ ID NO: 6062 - protein, 8 aa, Homo sapiens
KIPKTAEN

SEQ ID NO: 6063 - protein, 9 aa, Homo sapiens
HTGSGILSM

SEQ ID NO: 6064 - protein, 9 aa, Homo sapiens
ITIADCGQF

SEQ ID NO: 6065 - protein, 9 aa, Homo sapiens
WLDGKHVAF

SEQ ID NO: 6066 - protein, 9 aa, Homo sapiens
FADKIPKTA

SEQ ID NO: 6067 - protein, 8 aa, Homo sapiens
ITVDGKPL

SEQ ID NO: 6068 - protein, 10 aa, Homo sapiens
FDITVDGKPL

SEQ ID NO: 6069 - protein, 9 aa, Homo sapiens
WLDGKHVAF

SEQ ID NO: 6070 - protein, 11 aa, Homo sapiens
FFDITVDGKPL

SEQ ID NO: 6071 - protein, 9 aa, Homo sapiens
FFDITVDGK

SEQ ID NO: 6072 - protein, 8 aa, Homo sapiens
KFDDENLI

SEQ ID NO: 6073 - protein, 8 aa, Homo sapiens
FFDITVDG

SEQ ID NO: 6074 - protein, 9 aa, Homo sapiens
FRYKGSCFH

SEQ ID NO: 6075 - protein, 12 aa, Homo sapiens
FRYKGSCFHRII

SEQ ID NO: 6076 - protein, 11 aa, Homo sapiens
FRYKGSCFHRI

SEQ ID NO: 6077 - protein, 9 aa, Homo sapiens
HTGSGILSM

SEQ ID NO: 6078 - protein, 9 aa, Homo sapiens
SIYGEKFDD

SEQ ID NO: 6079 - protein, 8 aa, Homo sapiens
IFFDITVD

SEQ ID NO: 6080 - protein, 9 aa, Homo sapiens
FRYKGSCFH

SEQ ID NO: 6081 - protein, 8 aa, Homo sapiens
FRYKGSCF

SEQ ID NO: 6082 - protein, 12 aa, Homo sapiens
FRYKGSCFHRII

SEQ ID NO: 6083 - protein, 9 aa, Homo sapiens
ERVNIVEAM

SEQ ID NO: 6084 - protein, 8 aa, Homo sapiens
YRNSKTSK

SEQ ID NO: 6085 - protein, 9 aa, Homo sapiens
LSNLTHVLY

SEQ ID NO: 6086 - protein, 10 aa, Homo sapiens
CSQLTTLSFY

SEQ ID NO: 6087 - protein, 9 aa, Homo sapiens
WSGNRASLY

SEQ ID NO: 6088 - protein, 9 aa, Homo sapiens
ITDDQLLAL

SEQ ID NO: 6089 - protein, 9 aa, Homo sapiens
YVDSLFFLR

SEQ ID NO: 6090 - protein, 9 aa, Homo sapiens
NLTHVLYPV

SEQ ID NO: 6091 - protein, 10 aa, Homo sapiens
ALYVDSLFFL

SEQ ID NO: 6092 - protein, 9 aa, Homo sapiens
TLAKFSPYL

SEQ ID NO: 6093 - protein, 9 aa, Homo sapiens
QLLALLPSL

SEQ ID NO: 6094 - protein, 10 aa, Homo sapiens
WLLHHSWVWV

SEQ ID NO: 6095 - protein, 9 aa, Homo sapiens
SLLQHLIGL

SEQ ID NO: 6096 - protein, 10 aa, Homo sapiens
SNLTHVLYPV

SEQ ID NO: 6097 - protein, 10 aa, Homo sapiens
YELQEALISL

SEQ ID NO: 6098 - protein, 9 aa, Homo sapiens
VLDGLDVLL

SEQ ID NO: 6099 - protein, 9 aa, Homo sapiens
ALISLPHGL

SEQ ID NO: 6100 - protein, 9 aa, Homo sapiens
ALQSLLQHL

SEQ ID NO: 6101 - protein, 10 aa, Homo sapiens
RLSEGDVMHL

SEQ ID NO: 6102 - protein, 10 aa, Homo sapiens
ALLERASATL

SEQ ID NO: 6103 - protein, 9 aa, Homo sapiens
ELQEALISL

SEQ ID NO: 6104 - protein, 9 aa, Homo sapiens
RLDQLLRHV

SEQ ID NO: 6105 - protein, 10 aa, Homo sapiens
VLYPVPLESY

SEQ ID NO: 6106 - protein, 11 aa, Homo sapiens
KIFAMPMQDIK

SEQ ID NO: 6107 - protein, 10 aa, Homo sapiens
VELAGQSLLK

SEQ ID NO: 6108 - protein, 9 aa, Homo sapiens
ELFSYLIEK

SEQ ID NO: 6109 - protein, 9 aa, Homo sapiens
VLYPVPLES

SEQ ID NO: 6110 - protein, 9 aa, Homo sapiens
ASSYISPEK

SEQ ID NO: 6111 - protein, 10 aa, Homo sapiens
CTWKLPTLAK

SEQ ID NO: 6112 - protein, 10 aa, Homo sapiens
ISMSVWTSPR

SEQ ID NO: 6113 - protein, 9 aa, Homo sapiens
YVDSLFFLR

SEQ ID NO: 6114 - protein, 9 aa, Homo sapiens
EVLVDLFLK

SEQ ID NO: 6115 - protein, 9 aa, Homo sapiens
ELFSYLIEK

SEQ ID NO: 6116 - protein, 10 aa, Homo sapiens
QYIAQFTSQF

SEQ ID NO: 6117 - protein, 10 aa, Homo sapiens
RWLLHHSWVW

SEQ ID NO: 6118 - protein, 10 aa, Homo sapiens
TWKLPTLAKF

SEQ ID NO: 6119 - protein, 9 aa, Homo sapiens
LYVDSLFFL

SEQ ID NO: 6120 - protein, 9 aa, Homo sapiens
PYLGQMINL

SEQ ID NO: 6121 - protein, 9 aa, Homo sapiens
SYEDIHGTL

SEQ ID NO: 6122 - protein, 9 aa, Homo sapiens
QSRYISMSV

SEQ ID NO: 6123 - protein, 9 aa, Homo sapiens
KLKIFAMPM

SEQ ID NO: 6124 - protein, 10 aa, Homo sapiens
IQSRYISMSV

SEQ ID NO: 6125 - protein, 9 aa, Homo sapiens
ASSYISPEK

SEQ ID NO: 6126 - protein, 9 aa, Homo sapiens
TWKLPTLAK

SEQ ID NO: 6127 - protein, 9 aa, Homo sapiens
RLRELLCEL

SEQ ID NO: 6128 - protein, 9 aa, Homo sapiens
HSWVWVPFR

SEQ ID NO: 6129 - protein, 9 aa, Homo sapiens
SMSVWTSPR

SEQ ID NO: 6130 - protein, 10 aa, Homo sapiens
ISMSVWTSPR

SEQ ID NO: 6131 - protein, 9 aa, Homo sapiens
ETLSITNCR

SEQ ID NO: 6132 - protein, 9 aa, Homo sapiens
DSLFFLRGR

SEQ ID NO: 6133 - protein, 9 aa, Homo sapiens
YVDSLFFLR

SEQ ID NO: 6134 - protein, 10 aa, Homo sapiens
RPRRWKLQVL

SEQ ID NO: 6135 - protein, 9 aa, Homo sapiens
LPRGLGRWL

SEQ ID NO: 6136 - protein, 9 aa, Homo sapiens
RPRRWKLQV

SEQ ID NO: 6137 - protein, 9 aa, Homo sapiens
LPRELFPPL

SEQ ID NO: 6138 - protein, 10 aa, Homo sapiens
SPYLGQMINL

SEQ ID NO: 6139 - protein, 10 aa, Homo sapiens
SPSVSQLSVL

SEQ ID NO: 6140 - protein, 9 aa, Homo sapiens
YLHARLREL

SEQ ID NO: 6141 - protein, 9 aa, Homo sapiens
MINLRRLLL

SEQ ID NO: 6142 - protein, 9 aa, Homo sapiens
FLRGRLDQL

SEQ ID NO: 6143 - protein, 9 aa, Homo sapiens
KVKRKKNVL

SEQ ID NO: 6144 - protein, 10 aa, Homo sapiens
REYELQEALI

SEQ ID NO: 6145 - protein, 9 aa, Homo sapiens
CDELFSYLI

SEQ ID NO: 6146 - protein, 9 aa, Homo sapiens
LQSLLQHLI

SEQ ID NO: 6147 - protein, 10 aa, Homo sapiens
AEQPFIPVEV

SEQ ID NO: 6148 - protein, 9 aa, Homo sapiens
EQPFIPVEV

SEQ ID NO: 6149 - protein, 9 aa, Homo sapiens
RLCCKKLKI

SEQ ID NO: 6150 - protein, 9 aa, Homo sapiens
RLWGSIQSR

SEQ ID NO: 6151 - protein, 9 aa, Homo sapiens
YIAQFTSQF

SEQ ID NO: 6152 - protein, 9 aa, Homo sapiens
LSHIHASSY

SEQ ID NO: 6153 - protein, 10 aa, Homo sapiens
FAMPMQDIKM

SEQ ID NO: 6154 - protein, 10 aa, Homo sapiens
VLYPVPLESY

SEQ ID NO: 6155 - protein, 9 aa, Homo sapiens
AAFDGRHSQ

SEQ ID NO: 6156 - protein, 9 aa, Homo sapiens
VSPEPLQAL

SEQ ID NO: 6157 - protein, 9 aa, Homo sapiens
YLHARLREL

SEQ ID NO: 6158 - protein, 9 aa, Homo sapiens
ITDDQLLAL

SEQ ID NO: 6159 - protein, 9 aa, Homo sapiens
TSPRRLVEL

SEQ ID NO: 6160 - protein, 9 aa, Homo sapiens
AWPFTCLPL

SEQ ID NO: 6161 - protein, 9 aa, Homo sapiens
ISISALQSL

SEQ ID NO: 6162 - protein, 9 aa, Homo sapiens
LAIAALELL

SEQ ID NO: 6163 - protein, 9 aa, Homo sapiens
HVMNPLETL

SEQ ID NO: 6164 - protein, 8 aa, Homo sapiens
LAIAALEL

SEQ ID NO: 6165 - protein, 8 aa, Homo sapiens
FTSQFLSL

SEQ ID NO: 6166 - protein, 9 aa, Homo sapiens
FYDPEPILC

SEQ ID NO: 6167 - protein, 9 aa, Homo sapiens
SYEDIHGTL

SEQ ID NO: 6168 - protein, 9 aa, Homo sapiens
HHSWVWVPF

SEQ ID NO: 6169 - protein, 9 aa, Homo sapiens
FYDPEPILC

SEQ ID NO: 6170 - protein, 8 aa, Homo sapiens
FYDPEPIL

SEQ ID NO: 6171 - protein, 9 aa, Homo sapiens
VFDECGITD

SEQ ID NO: 6172 - protein, 9 aa, Homo sapiens
YLHARLREL

SEQ ID NO: 6173 - protein, 9 aa, Homo sapiens
KRKKNVLRL

SEQ ID NO: 6174 - protein, 9 aa, Homo sapiens
SFYGNSISI

SEQ ID NO: 6175 - protein, 9 aa, Homo sapiens
LHLERLAYL

SEQ ID NO: 6176 - protein, 8 aa, Homo sapiens
RRWKLQVL

SEQ ID NO: 6177 - protein, 10 aa, Homo sapiens
RRWKLQVLDL

SEQ ID NO: 6178 - protein, 9 aa, Homo sapiens
YLHARLREL

SEQ ID NO: 6179 - protein, 9 aa, Homo sapiens
LYVDSLFFL

SEQ ID NO: 6180 - protein, 9 aa, Homo sapiens
LHLERLAYL

SEQ ID NO: 6181 - protein, 9 aa, Homo sapiens
KRKKNVLRL

SEQ ID NO: 6182 - protein, 8 aa, Homo sapiens
FYDPEPIL

SEQ ID NO: 6183 - protein, 9 aa, Homo sapiens
SYEDIHGTL

SEQ ID NO: 6184 - protein, 9 aa, Homo sapiens
KSSANWMRY

SEQ ID NO: 6185 - protein, 9 aa, Homo sapiens
ISEPQDDDY

SEQ ID NO: 6186 - protein, 11 aa, Homo sapiens
ISEPQDDDYLY

SEQ ID NO: 6187 - protein, 12 aa, Homo sapiens
ITEDEEAANSGY

SEQ ID NO: 6188 - protein, 9 aa, Homo sapiens
ASDLPLGLH

SEQ ID NO: 6189 - protein, 12 aa, Homo sapiens
YLYCEMCQNFFI

SEQ ID NO: 6190 - protein, 9 aa, Homo sapiens
NMWNAITPL

SEQ ID NO: 6191 - protein, 10 aa, Homo sapiens
KMNYNALITV

SEQ ID NO: 6192 - protein, 12 aa, Homo sapiens
FSVNMWNAITPL

SEQ ID NO: 6193 - protein, 10 aa, Homo sapiens
SLLSELPRTI

SEQ ID NO: 6194 - protein, 9 aa, Homo sapiens
VLLMGPLHL

SEQ ID NO: 6195 - protein, 10 aa, Homo sapiens
VNMWNAITPL

SEQ ID NO: 6196 - protein, 9 aa, Homo sapiens
SMSLMLSGL

SEQ ID NO: 6197 - protein, 9 aa, Homo sapiens
SLLSELPRT

SEQ ID NO: 6198 - protein, 11 aa, Homo sapiens
LMLSGLFKSKI

SEQ ID NO: 6199 - protein, 9 aa, Homo sapiens
ALITVGLRA

SEQ ID NO: 6200 - protein, 9 aa, Homo sapiens
LLSELPRTI

SEQ ID NO: 6201 - protein, 8 aa, Homo sapiens
LLMGPLHL

SEQ ID NO: 6202 - protein, 9 aa, Homo sapiens
ELSGTPNLL

SEQ ID NO: 6203 - protein, 11 aa, Homo sapiens
SLRELSGTPNL

SEQ ID NO: 6204 - protein, 9 aa, Homo sapiens
SGDEYGQEL

SEQ ID NO: 6205 - protein, 10 aa, Homo sapiens
MSLMLSGLFK

SEQ ID NO: 6206 - protein, 9 aa, Homo sapiens
SLMLSGLFK

SEQ ID NO: 6207 - protein, 9 aa, Homo sapiens
KMYSLRERK

SEQ ID NO: 6208 - protein, 10 aa, Homo sapiens
ILIHAAVMTK

SEQ ID NO: 6209 - protein, 9 aa, Homo sapiens
SGYSWLITK

SEQ ID NO: 6210 - protein, 9 aa, Homo sapiens
AVMTKPKVK

SEQ ID NO: 6211 - protein, 9 aa, Homo sapiens
SELPRTICK

SEQ ID NO: 6212 - protein, 10 aa, Homo sapiens
MSLMLSGLFK

SEQ ID NO: 6213 - protein, 9 aa, Homo sapiens
SLMLSGLFK

SEQ ID NO: 6214 - protein, 9 aa, Homo sapiens
SSANWMRTK

SEQ ID NO: 6215 - protein, 9 aa, Homo sapiens
SGYSWLITK

SEQ ID NO: 6216 - protein, 9 aa, Homo sapiens
AVMTKPKVK

SEQ ID NO: 6217 - protein, 9 aa, Homo sapiens
AHGPPTFVK

SEQ ID NO: 6218 - protein, 9 aa, Homo sapiens
LYCEMCQNF

SEQ ID NO: 6219 - protein, 10 aa, Homo sapiens
YLYCEMCQNF

SEQ ID NO: 6220 - protein, 10 aa, Homo sapiens
LYCEMCQNFF

SEQ ID NO: 6221 - protein, 9 aa, Homo sapiens
HVPHAVWPF

SEQ ID NO: 6222 - protein, 9 aa, Homo sapiens
VWPFQVKNF

SEQ ID NO: 6223 - protein, 9 aa, Homo sapiens
AFKDISIYF

SEQ ID NO: 6224 - protein, 9 aa, Homo sapiens
RIRSGNILI

SEQ ID NO: 6225 - protein, 9 aa, Homo sapiens
KTRYRNVKM

SEQ ID NO: 6226 - protein, 10 aa, Homo sapiens
RCVRTSSLTA

SEQ ID NO: 6227 - protein, 9 aa, Homo sapiens
RTKARDPSM

SEQ ID NO: 6228 - protein, 9 aa, Homo sapiens
RYRNVKMNY

SEQ ID NO: 6229 - protein, 9 aa, Homo sapiens
AFKDISIYF

SEQ ID NO: 6230 - protein, 9 aa, Homo sapiens
RLKLELRRK

SEQ ID NO: 6231 - protein, 9 aa, Homo sapiens
HAVWPFQVK

SEQ ID NO: 6232 - protein, 10 aa, Homo sapiens
QVKPPWMAFR

SEQ ID NO: 6233 - protein, 9 aa, Homo sapiens
WMRYVNCAR

SEQ ID NO: 6234 - protein, 10 aa, Homo sapiens
FQYHRQIFYR

SEQ ID NO: 6235 - protein, 9 aa, Homo sapiens
NLVAFQYHR

SEQ ID NO: 6236 - protein, 11 aa, Homo sapiens
EMGDWEKTRYR

SEQ ID NO: 6237 - protein, 9 aa, Homo sapiens
QYHRQIFYR

SEQ ID NO: 6238 - protein, 9 aa, Homo sapiens
YSWLITKGR

SEQ ID NO: 6239 - protein, 9 aa, Homo sapiens
EMGDWEKTR

SEQ ID NO: 6240 - protein, 9 aa, Homo sapiens
HPNRSALSL

SEQ ID NO: 6241 - protein, 12 aa, Homo sapiens
RPAFMCHRRQAI

SEQ ID NO: 6242 - protein, 9 aa, Homo sapiens
KARDPSMSL

SEQ ID NO: 6243 - protein, 11 aa, Homo sapiens
LPRGSESGAAI

SEQ ID NO: 6244 - protein, 10 aa, Homo sapiens
GPSGIPQAGL

SEQ ID NO: 6245 - protein, 8 aa, Homo sapiens
KPMVSEPL

SEQ ID NO: 6246 - protein, 9 aa, Homo sapiens
IPQAGLGVW

SEQ ID NO: 6247 - protein, 9 aa, Homo sapiens
FMCHRRQAI

SEQ ID NO: 6248 - protein, 9 aa, Homo sapiens
NVKMNYNAL

SEQ ID NO: 6249 - protein, 10 aa, Homo sapiens
IVRCVRTSSL

SEQ ID NO: 6250 - protein, 11 aa, Homo sapiens
WMRTKARDPSM

SEQ ID NO: 6251 - protein, 8 aa, Homo sapiens
HSRLKLEL

SEQ ID NO: 6252 - protein, 8 aa, Homo sapiens
NALITVGL

SEQ ID NO: 6253 - protein, 8 aa, Homo sapiens
DGKDKSSA

SEQ ID NO: 6254 - protein, 9 aa, Homo sapiens
CEMCQNFFI

SEQ ID NO: 6255 - protein, 10 aa, Homo sapiens
YCEMCQNFFI

SEQ ID NO: 6256 - protein, 9 aa, Homo sapiens
MNYNALITV

SEQ ID NO: 6257 - protein, 12 aa, Homo sapiens
YLYCEMCQNFFI

SEQ ID NO: 6258 - protein, 8 aa, Homo sapiens
EQSKHQKI

SEQ ID NO: 6259 - protein, 10 aa, Homo sapiens
RQIFYRTCRV

SEQ ID NO: 6260 - protein, 9 aa, Homo sapiens
RSIHVPHAV

SEQ ID NO: 6261 - protein, 8 aa, Homo sapiens
RQAIKLQV

SEQ ID NO: 6262 - protein, 9 aa, Homo sapiens
FSVNMWNAI

SEQ ID NO: 6263 - protein, 9 aa, Homo sapiens
FTKEEWAEM

SEQ ID NO: 6264 - protein, 9 aa, Homo sapiens
MSLMLSGLF

SEQ ID NO: 6265 - protein, 10 aa, Homo sapiens
FQVKNFSVNM

SEQ ID NO: 6266 - protein, 9 aa, Homo sapiens
QVKPPWMAF

SEQ ID NO: 6267 - protein, 9 aa, Homo sapiens
KARDPSMSL

SEQ ID NO: 6268 - protein, 9 aa, Homo sapiens
SSIEPAESL

SEQ ID NO: 6269 - protein, 10 aa, Homo sapiens
SLRERKGHAY

SEQ ID NO: 6270 - protein, 9 aa, Homo sapiens
RTSSLTAVL

SEQ ID NO: 6271 - protein, 9 aa, Homo sapiens
KARDPSMSL

SEQ ID NO: 6272 - protein, 9 aa, Homo sapiens
FSVNMWNAI

SEQ ID NO: 6273 - protein, 9 aa, Homo sapiens
RVIRPGCEL

SEQ ID NO: 6274 - protein, 8 aa, Homo sapiens
TSPTRESL

SEQ ID NO: 6275 - protein, 9 aa, Homo sapiens
MSPERSQEE

SEQ ID NO: 6276 - protein, 9 aa, Homo sapiens
KIPMKNGHL

SEQ ID NO: 6277 - protein, 9 aa, Homo sapiens
KGHPNRSAL

SEQ ID NO: 6278 - protein, 9 aa, Homo sapiens
FSVNMWNAI

SEQ ID NO: 6279 - protein, 9 aa, Homo sapiens
SSIEPAESL

SEQ ID NO: 6280 - protein, 9 aa, Homo sapiens
ASFNNESSL

SEQ ID NO: 6281 - protein, 9 aa, Homo sapiens
KARDPSMSL

SEQ ID NO: 6282 - protein, 9 aa, Homo sapiens
CAAHGPPTF

SEQ ID NO: 6283 - protein, 9 aa, Homo sapiens
AANSGYSWL

SEQ ID NO: 6284 - protein, 9 aa, Homo sapiens
ARDPSMSLM

SEQ ID NO: 6285 - protein, 9 aa, Homo sapiens
RTSSLTAVL

SEQ ID NO: 6286 - protein, 9 aa, Homo sapiens
AFKDISIYF

SEQ ID NO: 6287 - protein, 9 aa, Homo sapiens
KARDPSMSL

SEQ ID NO: 6288 - protein, 8 aa, Homo sapiens
VWNEASDL

SEQ ID NO: 6289 - protein, 8 aa, Homo sapiens
SFNNESSL

SEQ ID NO: 6290 - protein, 9 aa, Homo sapiens
SGDEYGQEL

SEQ ID NO: 6291 - protein, 10 aa, Homo sapiens
LYCEMCQNFF

SEQ ID NO: 6292 - protein, 9 aa, Homo sapiens
LRATRPAFM

SEQ ID NO: 6293 - protein, 9 aa, Homo sapiens
SSANWMRYV

SEQ ID NO: 6294 - protein, 9 aa, Homo sapiens
ARDPSMSLM

SEQ ID NO: 6295 - protein, 9 aa, Homo sapiens
IRIRSGNIL

SEQ ID NO: 6296 - protein, 9 aa, Homo sapiens
GRNCYEYVD

SEQ ID NO: 6297 - protein, 9 aa, Homo sapiens
HRQIFYRTC

SEQ ID NO: 6298 - protein, 8 aa, Homo sapiens
ARDPSMSL

SEQ ID NO: 6299 - protein, 9 aa, Homo sapiens
ARDDEEQNL

SEQ ID NO: 6300 - protein, 9 aa, Homo sapiens
LRATRPAFM

SEQ ID NO: 6301 - protein, 9 aa, Homo sapiens
ARDPSMSLM

SEQ ID NO: 6302 - protein, 9 aa, Homo sapiens
IRIRSGNIL

SEQ ID NO: 6303 - protein, 9 aa, Homo sapiens
FQYHRQIFY

SEQ ID NO: 6304 - protein, 8 aa, Homo sapiens
ARDPSMSL

SEQ ID NO: 6305 - protein, 8 aa, Homo sapiens
IRPGCELL

SEQ ID NO: 6306 - protein, 8 aa, Homo sapiens
VKPPWMAF

SEQ ID NO: 6307 - protein, 9 aa, Homo sapiens
ARDDEEQNL

SEQ ID NO: 6308 - protein, 10 aa, Homo sapiens
CRSQSRSRYY

SEQ ID NO: 6309 - protein, 9 aa, Homo sapiens
RSQSRSRYY

SEQ ID NO: 6310 - protein, 11 aa, Homo sapiens
CCRSQSRSRYY

SEQ ID NO: 6311 - protein, 8 aa, Homo sapiens
RSQSRSRY

SEQ ID NO: 6312 - protein, 8 aa, Homo sapiens
SQSRSRYY

SEQ ID NO: 6313 - protein, 10 aa, Homo sapiens
RAMRCCRPRY

SEQ ID NO: 6314 - protein, 9 aa, Homo sapiens
RAMRCCRPR

SEQ ID NO: 6315 - protein, 9 aa, Homo sapiens
AMRCCRPRY

SEQ ID NO: 6316 - protein, 10 aa, Homo sapiens
AMRCCRPRYR

SEQ ID NO: 6317 - protein, 9 aa, Homo sapiens
SQSRSRYYR

SEQ ID NO: 6318 - protein, 10 aa, Homo sapiens
RRAMRCCRPR

SEQ ID NO: 6319 - protein, 10 aa, Homo sapiens
RSQSRSRYYR

SEQ ID NO: 6320 - protein, 10 aa, Homo sapiens
CQTRRRAMRC

SEQ ID NO: 6321 - protein, 11 aa, Homo sapiens
RAMRCCRPRYR

SEQ ID NO: 6322 - protein, 9 aa, Homo sapiens
MRCCRPRYR

SEQ ID NO: 6323 - protein, 9 aa, Homo sapiens
SCQTRRRAM

SEQ ID NO: 6324 - protein, 9 aa, Homo sapiens
RSCQTRRRA

SEQ ID NO: 6325 - protein, 9 aa, Homo sapiens
SRYYRQRQR

SEQ ID NO: 6326 - protein, 9 aa, Homo sapiens
YRCCRSQSR

SEQ ID NO: 6327 - protein, 9 aa, Homo sapiens
RYYRQRQRS

SEQ ID NO: 6328 - protein, 9 aa, Homo sapiens
RSQSRSRYY

SEQ ID NO: 6329 - protein, 8 aa, Homo sapiens
SCQTRRRA

SEQ ID NO: 6330 - protein, 10 aa, Homo sapiens
RAMRCCRPRY

SEQ ID NO: 6331 - protein, 10 aa, Homo sapiens
AMRCCRPRYR

SEQ ID NO: 6332 - protein, 9 aa, Homo sapiens
AMRCCRPRY

SEQ ID NO: 6333 - protein, 9 aa, Homo sapiens
RSQSRSRYY

SEQ ID NO: 6334 - protein, 9 aa, Homo sapiens
SRYYRQRQR

SEQ ID NO: 6335 - protein, 9 aa, Homo sapiens
RQRSRRRRR

SEQ ID NO: 6336 - protein, 9 aa, Homo sapiens
SQSRSRYYR

SEQ ID NO: 6337 - protein, 10 aa, Homo sapiens
RSQSRSRYYR

SEQ ID NO: 6338 - protein, 9 aa, Homo sapiens
RAMRCCRPR

SEQ ID NO: 6339 - protein, 9 aa, Homo sapiens
SRYYRQRQR

SEQ ID NO: 6340 - protein, 9 aa, Homo sapiens
RYYRQRQRS

SEQ ID NO: 6341 - protein, 10 aa, Homo sapiens
RYRCCRSQSR

SEQ ID NO: 6342 - protein, 10 aa, Homo sapiens
RYYRQRQRSR

SEQ ID NO: 6343 - protein, 9 aa, Homo sapiens
RYRPRCRRH

SEQ ID NO: 6344 - protein, 9 aa, Homo sapiens
YYRQRQRSR

SEQ ID NO: 6345 - protein, 9 aa, Homo sapiens
RYRCCRSQS

SEQ ID NO: 6346 - protein, 9 aa, Homo sapiens
RSRYYRQRQ

SEQ ID NO: 6347 - protein, 9 aa, Homo sapiens
RSRRRRRRS

SEQ ID NO: 6348 - protein, 9 aa, Homo sapiens
RSQSRSRYY

SEQ ID NO: 6349 - protein, 9 aa, Homo sapiens
RQRSRRRRR

SEQ ID NO: 6350 - protein, 8 aa, Homo sapiens
RSRYYRQR

SEQ ID NO: 6351 - protein, 9 aa, Homo sapiens
SQSRSRYYR

SEQ ID NO: 6352 - protein, 10 aa, Homo sapiens
RSQSRSRYYR

SEQ ID NO: 6353 - protein, 10 aa, Homo sapiens
AMRCCRPRYR

SEQ ID NO: 6354 - protein, 9 aa, Homo sapiens
RAMRCCRPR

SEQ ID NO: 6355 - protein, 9 aa, Homo sapiens
YYRQRQRSR

SEQ ID NO: 6356 - protein, 9 aa, Homo sapiens
SRYYRQRQR

SEQ ID NO: 6357 - protein, 8 aa, Homo sapiens
RYYRQRQR

SEQ ID NO: 6358 - protein, 10 aa, Homo sapiens
RSCQTRRRAM

SEQ ID NO: 6359 - protein, 8 aa, Homo sapiens
RPRYRPRC

SEQ ID NO: 6360 - protein, 9 aa, Homo sapiens
SCQTRRRAM

SEQ ID NO: 6361 - protein, 9 aa, Homo sapiens
RPRYRPRCR

SEQ ID NO: 6362 - protein, 10 aa, Homo sapiens
RPRYRPRCRR

SEQ ID NO: 6363 - protein, 8 aa, Homo sapiens
CQTRRRAM

SEQ ID NO: 6364 - protein, 9 aa, Homo sapiens
SCQTRRRAM

SEQ ID NO: 6365 - protein, 9 aa, Homo sapiens
MARYRCCRS

SEQ ID NO: 6366 - protein, 9 aa, Homo sapiens
SRRRRRRSC

SEQ ID NO: 6367 - protein, 9 aa, Homo sapiens
YYRQRQRSR

SEQ ID NO: 6368 - protein, 10 aa, Homo sapiens
RAMRCCRPRY

SEQ ID NO: 6369 - protein, 9 aa, Homo sapiens
AMRCCRPRY

SEQ ID NO: 6370 - protein, 12 aa, Homo sapiens
RAMRCCRPRYRP

SEQ ID NO: 6371 - protein, 9 aa, Homo sapiens
RYYRQRQRS

SEQ ID NO: 6372 - protein, 9 aa, Homo sapiens
RQRQRSRRR

SEQ ID NO: 6373 - protein, 9 aa, Homo sapiens
RQRSRRRRR

SEQ ID NO: 6374 - protein, 10 aa, Homo sapiens
RAMRCCRPRY

SEQ ID NO: 6375 - protein, 9 aa, Homo sapiens
RSQSRSRYY

SEQ ID NO: 6376 - protein, 9 aa, Homo sapiens
AMRCCRPRY

SEQ ID NO: 6377 - protein, 8 aa, Homo sapiens
RSQSRSRY

SEQ ID NO: 6378 - protein, 9 aa, Homo sapiens
RSQSRSRYY

SEQ ID NO: 6379 - protein, 10 aa, Homo sapiens
RSCQTRRRAM

SEQ ID NO: 6380 - protein, 9 aa, Homo sapiens
RAMRCCRPR

SEQ ID NO: 6381 - protein, 9 aa, Homo sapiens
AMRCCRPRY

SEQ ID NO: 6382 - protein, 9 aa, Homo sapiens
SCQTRRRAM

SEQ ID NO: 6383 - protein, 9 aa, Homo sapiens
RSQSRSRYY

SEQ ID NO: 6384 - protein, 9 aa, Homo sapiens
RAMRCCRPR

SEQ ID NO: 6385 - protein, 10 aa, Homo sapiens
RAMRCCRPRY

SEQ ID NO: 6386 - protein, 9 aa, Homo sapiens
SCQTRRRAM

SEQ ID NO: 6387 - protein, 8 aa, Homo sapiens
CQTRRRAM

SEQ ID NO: 6388 - protein, 9 aa, Homo sapiens
RAMRCCRPR

SEQ ID NO: 6389 - protein, 9 aa, Homo sapiens
SQSRSRYYR

SEQ ID NO: 6390 - protein, 9 aa, Homo sapiens
RSQSRSRYY

SEQ ID NO: 6391 - protein, 9 aa, Homo sapiens
RYRPRCRRH

SEQ ID NO: 6392 - protein, 8 aa, Homo sapiens
YYRQRQRS

SEQ ID NO: 6393 - protein, 8 aa, Homo sapiens
RYRPRCRR

SEQ ID NO: 6394 - protein, 9 aa, Homo sapiens
CRSQSRSRY

SEQ ID NO: 6395 - protein, 10 aa, Homo sapiens
CRSQSRSRYY

SEQ ID NO: 6396 - protein, 9 aa, Homo sapiens
RSQSRSRYY

SEQ ID NO: 6397 - protein, 9 aa, Homo sapiens
SRYYRQRQR

SEQ ID NO: 6398 - protein, 9 aa, Homo sapiens
CRSQSRSRY

SEQ ID NO: 6399 - protein, 9 aa, Homo sapiens
RSQSRSRYY

SEQ ID NO: 6400 - protein, 9 aa, Homo sapiens
YYRQRQRSR

SEQ ID NO: 6401 - protein, 8 aa, Homo sapiens
YRPRCRRH

SEQ ID NO: 6402 - protein, 8 aa, Homo sapiens
YRQRQRSR

SEQ ID NO: 6403 - protein, 9 aa, Homo sapiens
LSERSHEVY

SEQ ID NO: 6404 - protein, 10 aa, Homo sapiens
SLSERSHEVY

SEQ ID NO: 6405 - protein, 9 aa, Homo sapiens
LSPEHVEVY

SEQ ID NO: 6406 - protein, 9 aa, Homo sapiens
LGDPLNQNF

SEQ ID NO: 6407 - protein, 9 aa, Homo sapiens
SLSERSHEV

SEQ ID NO: 6408 - protein, 9 aa, Homo sapiens
GLSPEHVEV

SEQ ID NO: 6409 - protein, 10 aa, Homo sapiens
RSLSERSHEV

SEQ ID NO: 6410 - protein, 10 aa, Homo sapiens
QGLSPEHVEV

SEQ ID NO: 6411 - protein, 12 aa, Homo sapiens
KLPGPLTPSWKL

SEQ ID NO: 6412 - protein, 11 aa, Homo sapiens
SLGDPLNQNFL

SEQ ID NO: 6413 - protein, 9 aa, Homo sapiens
KLPGPLTPS

SEQ ID NO: 6414 - protein, 10 aa, Homo sapiens
GLSPEHVEVY

SEQ ID NO: 6415 - protein, 10 aa, Homo sapiens
SLSERSHEVY

SEQ ID NO: 6416 - protein, 9 aa, Homo sapiens
SLGDPLNQN

SEQ ID NO: 6417 - protein, 9 aa, Homo sapiens
FLSQKAAEP

SEQ ID NO: 6418 - protein, 10 aa, Homo sapiens
SLGDPLNQNF

SEQ ID NO: 6419 - protein, 8 aa, Homo sapiens
SLGDPLNQ

SEQ ID NO: 6420 - protein, 11 aa, Homo sapiens
KLPGPLTPSWK

SEQ ID NO: 6421 - protein, 9 aa, Homo sapiens
RTHGQSHYR

SEQ ID NO: 6422 - protein, 9 aa, Homo sapiens
LTPSWKLRK

SEQ ID NO: 6423 - protein, 9 aa, Homo sapiens
KLPGPLTPS

SEQ ID NO: 6424 - protein, 9 aa, Homo sapiens
RTHGQSHYR

SEQ ID NO: 6425 - protein, 9 aa, Homo sapiens
LTPSWKLRK

SEQ ID NO: 6426 - protein, 10 aa, Homo sapiens
RTHGQSHYRR

SEQ ID NO: 6427 - protein, 10 aa, Homo sapiens
KLPGPLTPSW

SEQ ID NO: 6428 - protein, 10 aa, Homo sapiens
SLGDPLNQNF

SEQ ID NO: 6429 - protein, 12 aa, Homo sapiens
KLPGPLTPSWKL

SEQ ID NO: 6430 - protein, 9 aa, Homo sapiens
LGDPLNQNF

SEQ ID NO: 6431 - protein, 9 aa, Homo sapiens
KSRPKHQVR

SEQ ID NO: 6432 - protein, 9 aa, Homo sapiens
RYRVRSLSE

SEQ ID NO: 6433 - protein, 9 aa, Homo sapiens
RTRKRTCRR

SEQ ID NO: 6434 - protein, 9 aa, Homo sapiens
RSHEVYRQQ

SEQ ID NO: 6435 - protein, 10 aa, Homo sapiens
RSHEVYRQQL

SEQ ID NO: 6436 - protein, 9 aa, Homo sapiens
RTHGQSHYR

SEQ ID NO: 6437 - protein, 9 aa, Homo sapiens
HYRRRHCSR

SEQ ID NO: 6438 - protein, 10 aa, Homo sapiens
ERTHGQSHYR

SEQ ID NO: 6439 - protein, 8 aa, Homo sapiens
EHVEVYER

SEQ ID NO: 6440 - protein, 9 aa, Homo sapiens
EVYERTHGQ

SEQ ID NO: 6441 - protein, 9 aa, Homo sapiens
MVRYRVRSL

SEQ ID NO: 6442 - protein, 9 aa, Homo sapiens
GPLTPSWKL

SEQ ID NO: 6443 - protein, 11 aa, Homo sapiens
LPGPLTPSWKL

SEQ ID NO: 6444 - protein, 9 aa, Homo sapiens
LPGPLTPSW

SEQ ID NO: 6445 - protein, 9 aa, Homo sapiens
MVRYRVRSL

SEQ ID NO: 6446 - protein, 10 aa, Homo sapiens
MVRYRVRSLS

SEQ ID NO: 6447 - protein, 8 aa, Homo sapiens
VRYRVRSL

SEQ ID NO: 6448 - protein, 9 aa, Homo sapiens
CSRRRLHRI

SEQ ID NO: 6449 - protein, 9 aa, Homo sapiens
SLSERSHEV

SEQ ID NO: 6450 - protein, 8 aa, Homo sapiens
DPLNQNFL

SEQ ID NO: 6451 - protein, 9 aa, Homo sapiens
REHAEGTKL

SEQ ID NO: 6452 - protein, 10 aa, Homo sapiens
RSLSERSHEV

SEQ ID NO: 6453 - protein, 9 aa, Homo sapiens
CSRRRLHRI

SEQ ID NO: 6454 - protein, 9 aa, Homo sapiens
GLSPEHVEV

SEQ ID NO: 6455 - protein, 9 aa, Homo sapiens
NQNFLSQKA

SEQ ID NO: 6456 - protein, 9 aa, Homo sapiens
LSPEHVEVY

SEQ ID NO: 6457 - protein, 9 aa, Homo sapiens
MVRYRVRSL

SEQ ID NO: 6458 - protein, 9 aa, Homo sapiens
LSERSHEVY

SEQ ID NO: 6459 - protein, 9 aa, Homo sapiens
YERTHGQSH

SEQ ID NO: 6460 - protein, 9 aa, Homo sapiens
KAAEPGREH

SEQ ID NO: 6461 - protein, 9 aa, Homo sapiens
MVRYRVRSL

SEQ ID NO: 6462 - protein, 9 aa, Homo sapiens
SLSERSHEV

SEQ ID NO: 6463 - protein, 9 aa, Homo sapiens
LSPEHVEVY

SEQ ID NO: 6464 - protein, 8 aa, Homo sapiens
LSPEHVEV

SEQ ID NO: 6465 - protein, 9 aa, Homo sapiens
KLPGPLTPS

SEQ ID NO: 6466 - protein, 9 aa, Homo sapiens
MVRYRVRSL

SEQ ID NO: 6467 - protein, 9 aa, Homo sapiens
SLSERSHEV

SEQ ID NO: 6468 - protein, 9 aa, Homo sapiens
LSPEHVEVY

SEQ ID NO: 6469 - protein, 9 aa, Homo sapiens
KAAEPGREH

SEQ ID NO: 6470 - protein, 8 aa, Homo sapiens
AAEPGREH

SEQ ID NO: 6471 - protein, 9 aa, Homo sapiens
LGDPLNQNF

SEQ ID NO: 6472 - protein, 9 aa, Homo sapiens
RRHCSRRRL

SEQ ID NO: 6473 - protein, 9 aa, Homo sapiens
SLSERSHEV

SEQ ID NO: 6474 - protein, 9 aa, Homo sapiens
SHEVYRQQL

SEQ ID NO: 6475 - protein, 8 aa, Homo sapiens
LSPEHVEV

SEQ ID NO: 6476 - protein, 10 aa, Homo sapiens
LGDPLNQNFL

SEQ ID NO: 6477 - protein, 9 aa, Homo sapiens
RRHCSRRRL

SEQ ID NO: 6478 - protein, 9 aa, Homo sapiens
MVRYRVRSL

SEQ ID NO: 6479 - protein, 9 aa, Homo sapiens
RRRHRRESL

SEQ ID NO: 6480 - protein, 8 aa, Homo sapiens
VRYRVRSL

SEQ ID NO: 6481 - protein, 9 aa, Homo sapiens
LSPEHVEVY

SEQ ID NO: 6482 - protein, 9 aa, Homo sapiens
RRHCSRRRL

SEQ ID NO: 6483 - protein, 9 aa, Homo sapiens
MVRYRVRSL

SEQ ID NO: 6484 - protein, 9 aa, Homo sapiens
RRRHRRESL

SEQ ID NO: 6485 - protein, 8 aa, Homo sapiens
VRYRVRSL

SEQ ID NO: 6486 - protein, 9 aa, Homo sapiens
LSPEHVEVY

SEQ ID NO: 6487 - protein, 9 aa, Homo sapiens
FSFTYTPEY

SEQ ID NO: 6488 - protein, 9 aa, Homo sapiens
CSDWRWLRA

SEQ ID NO: 6489 - protein, 9 aa, Homo sapiens
ETGPTVCGY

SEQ ID NO: 6490 - protein, 10 aa, Homo sapiens
DVEAETMYRY

SEQ ID NO: 6491 - protein, 9 aa, Homo sapiens
ATDADALLE

SEQ ID NO: 6492 - protein, 8 aa, Homo sapiens
ATDADALL

SEQ ID NO: 6493 - protein, 9 aa, Homo sapiens
SLACTLEPV

SEQ ID NO: 6494 - protein, 9 aa, Homo sapiens
ALLDVDEPI

SEQ ID NO: 6495 - protein, 9 aa, Homo sapiens
YLSGPGWRV

SEQ ID NO: 6496 - protein, 9 aa, Homo sapiens
SLVCVVPDV

SEQ ID NO: 6497 - protein, 10 aa, Homo sapiens
YLSVEDGAFV

SEQ ID NO: 6498 - protein, 12 aa, Homo sapiens
FSTSLACTLEPV

SEQ ID NO: 6499 - protein, 9 aa, Homo sapiens
SLVQLVCTV

SEQ ID NO: 6500 - protein, 10 aa, Homo sapiens
TSLACTLEPV

SEQ ID NO: 6501 - protein, 9 aa, Homo sapiens
YLCLATEKV

SEQ ID NO: 6502 - protein, 9 aa, Homo sapiens
ALLESIHQE

SEQ ID NO: 6503 - protein, 12 aa, Homo sapiens
ALLDVDEPISQL

SEQ ID NO: 6504 - protein, 10 aa, Homo sapiens
SLQDRSEMQL

SEQ ID NO: 6505 - protein, 9 aa, Homo sapiens
GLLQRLALA

SEQ ID NO: 6506 - protein, 9 aa, Homo sapiens
GTFHSRLIK

SEQ ID NO: 6507 - protein, 10 aa, Homo sapiens
RILHAKVAQK

SEQ ID NO: 6508 - protein, 9 aa, Homo sapiens
KVISKPSQK

SEQ ID NO: 6509 - protein, 10 aa, Homo sapiens
ITLPPMIIRK

SEQ ID NO: 6510 - protein, 9 aa, Homo sapiens
TLPPMIIRK

SEQ ID NO: 6511 - protein, 9 aa, Homo sapiens
GTFHSRLIK

SEQ ID NO: 6512 - protein, 9 aa, Homo sapiens
QTVRILHAK

SEQ ID NO: 6513 - protein, 10 aa, Homo sapiens
GTYLCLATEK

SEQ ID NO: 6514 - protein, 10 aa, Homo sapiens
ITLPPMIIRK

SEQ ID NO: 6515 - protein, 9 aa, Homo sapiens
RSLPGTWTR

SEQ ID NO: 6516 - protein, 9 aa, Homo sapiens
ITLPPMIIR

SEQ ID NO: 6517 - protein, 9 aa, Homo sapiens
RYGSLVQLV

SEQ ID NO: 6518 - protein, 9 aa, Homo sapiens
LFYPSAFSF

SEQ ID NO: 6519 - protein, 9 aa, Homo sapiens
RWLRAPITI

SEQ ID NO: 6520 - protein, 10 aa, Homo sapiens
EFTRTNFHLF

SEQ ID NO: 6521 - protein, 8 aa, Homo sapiens
FYPSAFSF

SEQ ID NO: 6522 - protein, 9 aa, Homo sapiens
SVRPGHPGV

SEQ ID NO: 6523 - protein, 9 aa, Homo sapiens
GTFHSRLIK

SEQ ID NO: 6524 - protein, 10 aa, Homo sapiens
HSRLIKVISK

SEQ ID NO: 6525 - protein, 9 aa, Homo sapiens
KVISKPSQK

SEQ ID NO: 6526 - protein, 9 aa, Homo sapiens
FCSDWRWLR

SEQ ID NO: 6527 - protein, 10 aa, Homo sapiens
AFCSDWRWLR

SEQ ID NO: 6528 - protein, 11 aa, Homo sapiens
AAFCSDWRWLR

SEQ ID NO: 6529 - protein, 9 aa, Homo sapiens
ESIHQEFTR

SEQ ID NO: 6530 - protein, 9 aa, Homo sapiens
TYTPEYSVR

SEQ ID NO: 6531 - protein, 9 aa, Homo sapiens
ITLPPMIIR

SEQ ID NO: 6532 - protein, 9 aa, Homo sapiens
CPKEANRAL

SEQ ID NO: 6533 - protein, 10 aa, Homo sapiens
HEPGARRRAL

SEQ ID NO: 6534 - protein, 9 aa, Homo sapiens
KPSQKKQSL

SEQ ID NO: 6535 - protein, 9 aa, Homo sapiens
APITIPMSL

SEQ ID NO: 6536 - protein, 10 aa, Homo sapiens
SPPGGGGTYL

SEQ ID NO: 6537 - protein, 9 aa, Homo sapiens
TPVPLISTL

SEQ ID NO: 6538 - protein, 9 aa, Homo sapiens
EPGARRRAL

SEQ ID NO: 6539 - protein, 12 aa, Homo sapiens
MIIRKVAKQCAL

SEQ ID NO: 6540 - protein, 9 aa, Homo sapiens
EGYVRYGSL

SEQ ID NO: 6541 - protein, 9 aa, Homo sapiens
KPSQKKQSL

SEQ ID NO: 6542 - protein, 8 aa, Homo sapiens
NPLTHLSL

SEQ ID NO: 6543 - protein, 10 aa, Homo sapiens
SDWRWLRAPI

SEQ ID NO: 6544 - protein, 9 aa, Homo sapiens
VEFSFSTSL

SEQ ID NO: 6545 - protein, 10 aa, Homo sapiens
RQWAAFTLHL

SEQ ID NO: 6546 - protein, 9 aa, Homo sapiens
RSSPEHTTI

SEQ ID NO: 6547 - protein, 9 aa, Homo sapiens
YLSGPGWRV

SEQ ID NO: 6548 - protein, 9 aa, Homo sapiens
RLIKVISKP

SEQ ID NO: 6549 - protein, 9 aa, Homo sapiens
FSFTYTPEY

SEQ ID NO: 6550 - protein, 9 aa, Homo sapiens
CVVPDVAAF

SEQ ID NO: 6551 - protein, 9 aa, Homo sapiens
FTRTNFHLF

SEQ ID NO: 6552 - protein, 8 aa, Homo sapiens
SARQWAAF

SEQ ID NO: 6553 - protein, 9 aa, Homo sapiens
PPREGYVRY

SEQ ID NO: 6554 - protein, 9 aa, Homo sapiens
FSTSLACTL

SEQ ID NO: 6555 - protein, 9 aa, Homo sapiens
SSPEHTTIL

SEQ ID NO: 6556 - protein, 9 aa, Homo sapiens
TMYRSPRSL

SEQ ID NO: 6557 - protein, 10 aa, Homo sapiens
RAPITIPMSL

SEQ ID NO: 6558 - protein, 10 aa, Homo sapiens
VTPVPLISTL

SEQ ID NO: 6559 - protein, 9 aa, Homo sapiens
FSTSLACTL

SEQ ID NO: 6560 - protein, 9 aa, Homo sapiens
LSLQDRSEM

SEQ ID NO: 6561 - protein, 9 aa, Homo sapiens
LVLRGGREL

SEQ ID NO: 6562 - protein, 8 aa, Homo sapiens
WAAFTLHL

SEQ ID NO: 6563 - protein, 9 aa, Homo sapiens
LFYPSAFSF

SEQ ID NO: 6564 - protein, 10 aa, Homo sapiens
FYPSAFSFTY

SEQ ID NO: 6565 - protein, 9 aa, Homo sapiens
MYRSPRSLV

SEQ ID NO: 6566 - protein, 8 aa, Homo sapiens
FYPSAFSF

SEQ ID NO: 6567 - protein, 8 aa, Homo sapiens
ATDADALL

SEQ ID NO: 6568 - protein, 9 aa, Homo sapiens
TRTNFHLFI

SEQ ID NO: 6569 - protein, 9 aa, Homo sapiens
VRYGSLVQL

SEQ ID NO: 6570 - protein, 9 aa, Homo sapiens
LRAPITIPM

SEQ ID NO: 6571 - protein, 9 aa, Homo sapiens
KRKHFRLVL

SEQ ID NO: 6572 - protein, 9 aa, Homo sapiens
LRGGVRRCL

SEQ ID NO: 6573 - protein, 9 aa, Homo sapiens
YRSPRSLVC

SEQ ID NO: 6574 - protein, 9 aa, Homo sapiens
TRTNFHLFI

SEQ ID NO: 6575 - protein, 9 aa, Homo sapiens
LRAPITIPM

SEQ ID NO: 6576 - protein, 9 aa, Homo sapiens
LFYPSAFSF

SEQ ID NO: 6577 - protein, 9 aa, Homo sapiens
ARQWAAFTL

SEQ ID NO: 6578 - protein, 8 aa, Homo sapiens
FYPSAFSF

SEQ ID NO: 6579 - protein, 10 aa, Homo sapiens
FYPSAFSFTY

SEQ ID NO: 6580 - protein, 9 aa, Homo sapiens
DSNPSELKY

SEQ ID NO: 6581 - protein, 10 aa, Homo sapiens
ADSNPSELKY

SEQ ID NO: 6582 - protein, 11 aa, Homo sapiens
AADSNPSELKY

SEQ ID NO: 6583 - protein, 9 aa, Homo sapiens
FLGALSKLY

SEQ ID NO: 6584 - protein, 9 aa, Homo sapiens
CTKRSLAKY

SEQ ID NO: 6585 - protein, 12 aa, Homo sapiens
EAADSNPSELKY

SEQ ID NO: 6586 - protein, 9 aa, Homo sapiens
DSNLSFEEF

SEQ ID NO: 6587 - protein, 11 aa, Homo sapiens
DTETIIIMLEF

SEQ ID NO: 6588 - protein, 10 aa, Homo sapiens
FTREFLGALS

SEQ ID NO: 6589 - protein, 8 aa, Homo sapiens
LLEFCLLL

SEQ ID NO: 6590 - protein, 9 aa, Homo sapiens
LLEFCLLLN

SEQ ID NO: 6591 - protein, 9 aa, Homo sapiens
DTETIIIML

SEQ ID NO: 6592 - protein, 9 aa, Homo sapiens
AADSNPSEL

SEQ ID NO: 6593 - protein, 9 aa, Homo sapiens
PSELKYLGL

SEQ ID NO: 6594 - protein, 9 aa, Homo sapiens
LSERQPSLP

SEQ ID NO: 6595 - protein, 9 aa, Homo sapiens
IMLEFIANL

SEQ ID NO: 6596 - protein, 10 aa, Homo sapiens
FLFHLLEFCL

SEQ ID NO: 6597 - protein, 9 aa, Homo sapiens
SLPELQQYV

SEQ ID NO: 6598 - protein, 9 aa, Homo sapiens
HLLEFCLLL

SEQ ID NO: 6599 - protein, 10 aa, Homo sapiens
IIMLEFIANL

SEQ ID NO: 6600 - protein, 10 aa, Homo sapiens
FHLLEFCLLL

SEQ ID NO: 6601 - protein, 9 aa, Homo sapiens
FIANLPPEL

SEQ ID NO: 6602 - protein, 9 aa, Homo sapiens
ALFEKCCLI

SEQ ID NO: 6603 - protein, 12 aa, Homo sapiens
FLFHLLEFCLLL

SEQ ID NO: 6604 - protein, 11 aa, Homo sapiens
FLFHLLEFCLL

SEQ ID NO: 6605 - protein, 9 aa, Homo sapiens
FLFHLLEFC

SEQ ID NO: 6606 - protein, 10 aa, Homo sapiens
LLLNQFSRAV

SEQ ID NO: 6607 - protein, 9 aa, Homo sapiens
FIQTVSLGI

SEQ ID NO: 6608 - protein, 10 aa, Homo sapiens
IMLEFIANLP

SEQ ID NO: 6609 - protein, 11 aa, Homo sapiens
LFLFHLLEFCL

SEQ ID NO: 6610 - protein, 8 aa, Homo sapiens
MLEFIANL

SEQ ID NO: 6611 - protein, 11 aa, Homo sapiens
IIIMLEFIANL

SEQ ID NO: 6612 - protein, 10 aa, Homo sapiens
HLLEFCLLLN

SEQ ID NO: 6613 - protein, 12 aa, Homo sapiens
RLFLFHLLEFCL

SEQ ID NO: 6614 - protein, 12 aa, Homo sapiens
LFLFHLLEFCLL

SEQ ID NO: 6615 - protein, 9 aa, Homo sapiens
ALSERQPSL

SEQ ID NO: 6616 - protein, 9 aa, Homo sapiens
LLLNQFSRA

SEQ ID NO: 6617 - protein, 10 aa, Homo sapiens
PSLPELQQYV

SEQ ID NO: 6618 - protein, 11 aa, Homo sapiens
YVALFEKCCLI

SEQ ID NO: 6619 - protein, 9 aa, Homo sapiens
LLNQFSRAV

SEQ ID NO: 6620 - protein, 9 aa, Homo sapiens
FINKDTETI

SEQ ID NO: 6621 - protein, 12 aa, Homo sapiens
TIIIMLEFIANL

SEQ ID NO: 6622 - protein, 10 aa, Homo sapiens
KLCGRELVRA

SEQ ID NO: 6623 - protein, 9 aa, Homo sapiens
VAGDFIQTV

SEQ ID NO: 6624 - protein, 9 aa, Homo sapiens
ELQQYVPAL

SEQ ID NO: 6625 - protein, 8 aa, Homo sapiens
HLLEFCLL

SEQ ID NO: 6626 - protein, 9 aa, Homo sapiens
KWKDDVIKL

SEQ ID NO: 6627 - protein, 8 aa, Homo sapiens
FLGALSKL

SEQ ID NO: 6628 - protein, 9 aa, Homo sapiens
NLPPELKAA

SEQ ID NO: 6629 - protein, 8 aa, Homo sapiens
ALFEKCCL

SEQ ID NO: 6630 - protein, 9 aa, Homo sapiens
ALKDSNLSF

SEQ ID NO: 6631 - protein, 8 aa, Homo sapiens
FLFHLLEF

SEQ ID NO: 6632 - protein, 8 aa, Homo sapiens
RLFLFHLL

SEQ ID NO: 6633 - protein, 8 aa, Homo sapiens
KLCGRELV

SEQ ID NO: 6634 - protein, 10 aa, Homo sapiens
KLYHPSSTKI

SEQ ID NO: 6635 - protein, 9 aa, Homo sapiens
YLGLDTHSQ

SEQ ID NO: 6636 - protein, 9 aa, Homo sapiens
KLYHPSSTK

SEQ ID NO: 6637 - protein, 10 aa, Homo sapiens
SKLYHPSSTK

SEQ ID NO: 6638 - protein, 12 aa, Homo sapiens
KLYHPSSTKIQK

SEQ ID NO: 6639 - protein, 10 aa, Homo sapiens
KLYHPSSTKI

SEQ ID NO: 6640 - protein, 12 aa, Homo sapiens
ALSKLYHPSSTK

SEQ ID NO: 6641 - protein, 11 aa, Homo sapiens
LSKLYHPSSTK

SEQ ID NO: 6642 - protein, 10 aa, Homo sapiens
AEIVPSFINK

SEQ ID NO: 6643 - protein, 10 aa, Homo sapiens
AICGMSTWSK

SEQ ID NO: 6644 - protein, 10 aa, Homo sapiens
FIANLPPELK

SEQ ID NO: 6645 - protein, 12 aa, Homo sapiens
CLIGCTKRSLAK

SEQ ID NO: 6646 - protein, 9 aa, Homo sapiens
EIVPSFINK

SEQ ID NO: 6647 - protein, 9 aa, Homo sapiens
REFLGALSK

SEQ ID NO: 6648 - protein, 10 aa, Homo sapiens
RLFLFHLLEF

SEQ ID NO: 6649 - protein, 9 aa, Homo sapiens
RPYVALFEK

SEQ ID NO: 6650 - protein, 9 aa, Homo sapiens
HLLEFCLLL

SEQ ID NO: 6651 - protein, 9 aa, Homo sapiens
RLFLFHLLE

SEQ ID NO: 6652 - protein, 10 aa, Homo sapiens
AEIVPSFINK

SEQ ID NO: 6653 - protein, 10 aa, Homo sapiens
AICGMSTWSK

SEQ ID NO: 6654 - protein, 9 aa, Homo sapiens
KLYHPSSTK

SEQ ID NO: 6655 - protein, 9 aa, Homo sapiens
EIVPSFINK

SEQ ID NO: 6656 - protein, 10 aa, Homo sapiens
FIANLPPELK

SEQ ID NO: 6657 - protein, 10 aa, Homo sapiens
SKLYHPSSTK

SEQ ID NO: 6658 - protein, 9 aa, Homo sapiens
LQQYVPALK

SEQ ID NO: 6659 - protein, 9 aa, Homo sapiens
IANLPPELK

SEQ ID NO: 6660 - protein, 10 aa, Homo sapiens
AADSNPSELK

SEQ ID NO: 6661 - protein, 9 aa, Homo sapiens
REFLGALSK

SEQ ID NO: 6662 - protein, 9 aa, Homo sapiens
RPYVALFEK

SEQ ID NO: 6663 - protein, 10 aa, Homo sapiens
SNLSFEEFKK

SEQ ID NO: 6664 - protein, 8 aa, Homo sapiens
IVPSFINK

SEQ ID NO: 6665 - protein, 9 aa, Homo sapiens
ADSNPSELK

SEQ ID NO: 6666 - protein, 9 aa, Homo sapiens
SNLSFEEFK

SEQ ID NO: 6667 - protein, 10 aa, Homo sapiens
RLFLFHLLEF

SEQ ID NO: 6668 - protein, 9 aa, Homo sapiens
LFLFHLLEF

SEQ ID NO: 6669 - protein, 9 aa, Homo sapiens
LYHPSSTKI

SEQ ID NO: 6670 - protein, 12 aa, Homo sapiens
PYVALFEKCCLI

SEQ ID NO: 6671 - protein, 10 aa, Homo sapiens
SFINKDTETI

SEQ ID NO: 6672 - protein, 12 aa, Homo sapiens
MPRLFLFHLLEF

SEQ ID NO: 6673 - protein, 10 aa, Homo sapiens
REFLGALSKL

SEQ ID NO: 6674 - protein, 10 aa, Homo sapiens
KLYHPSSTKI

SEQ ID NO: 6675 - protein, 9 aa, Homo sapiens
KWKDDVIKL

SEQ ID NO: 6676 - protein, 9 aa, Homo sapiens
PVAEIVPSF

SEQ ID NO: 6677 - protein, 9 aa, Homo sapiens
EFCLLLNQF

SEQ ID NO: 6678 - protein, 9 aa, Homo sapiens
ALKDSNLSF

SEQ ID NO: 6679 - protein, 9 aa, Homo sapiens
IMLEFIANL

SEQ ID NO: 6680 - protein, 9 aa, Homo sapiens
EFLGALSKL

SEQ ID NO: 6681 - protein, 9 aa, Homo sapiens
KRRPYVALF

SEQ ID NO: 6682 - protein, 10 aa, Homo sapiens
HSQKKRRPYV

SEQ ID NO: 6683 - protein, 9 aa, Homo sapiens
SQKKRRPYV

SEQ ID NO: 6684 - protein, 9 aa, Homo sapiens
KLYHPSSTK

SEQ ID NO: 6685 - protein, 9 aa, Homo sapiens
LSKLYHPSS

SEQ ID NO: 6686 - protein, 10 aa, Homo sapiens
FSRAVAAKWK

SEQ ID NO: 6687 - protein, 10 aa, Homo sapiens
KALRTGSCFT

SEQ ID NO: 6688 - protein, 10 aa, Homo sapiens
SQKKRRPYVA

SEQ ID NO: 6689 - protein, 11 aa, Homo sapiens
LSKLYHPSSTK

SEQ ID NO: 6690 - protein, 9 aa, Homo sapiens
RAQIAICGM

SEQ ID NO: 6691 - protein, 9 aa, Homo sapiens
KWKDDVIKL

SEQ ID NO: 6692 - protein, 9 aa, Homo sapiens
KCCLIGCTK

SEQ ID NO: 6693 - protein, 10 aa, Homo sapiens
AEIVPSFINK

SEQ ID NO: 6694 - protein, 9 aa, Homo sapiens
REFLGALSK

SEQ ID NO: 6695 - protein, 9 aa, Homo sapiens
LSFEEFKKL

SEQ ID NO: 6696 - protein, 9 aa, Homo sapiens
EIVPSFINK

SEQ ID NO: 6697 - protein, 9 aa, Homo sapiens
HSQKKRRPY

SEQ ID NO: 6698 - protein, 9 aa, Homo sapiens
ELKAALSER

SEQ ID NO: 6699 - protein, 9 aa, Homo sapiens
EFKKLIRNR

SEQ ID NO: 6700 - protein, 9 aa, Homo sapiens
CGMSTWSKR

SEQ ID NO: 6701 - protein, 10 aa, Homo sapiens
EEFKKLIRNR

SEQ ID NO: 6702 - protein, 9 aa, Homo sapiens
CLLLNQFSR

SEQ ID NO: 6703 - protein, 11 aa, Homo sapiens
EFCLLLNQFSR

SEQ ID NO: 6704 - protein, 10 aa, Homo sapiens
ALRTGSCFTR

SEQ ID NO: 6705 - protein, 10 aa, Homo sapiens
PELKAALSER

SEQ ID NO: 6706 - protein, 10 aa, Homo sapiens
FCLLLNQFSR

SEQ ID NO: 6707 - protein, 9 aa, Homo sapiens
EIVPSFINK

SEQ ID NO: 6708 - protein, 8 aa, Homo sapiens
DVIKLCGR

SEQ ID NO: 6709 - protein, 9 aa, Homo sapiens
DTHSQKKRR

SEQ ID NO: 6710 - protein, 8 aa, Homo sapiens
DTHSQKKR

SEQ ID NO: 6711 - protein, 9 aa, Homo sapiens
DDVIKLCGR

SEQ ID NO: 6712 - protein, 9 aa, Homo sapiens
TPRPVAGDF

SEQ ID NO: 6713 - protein, 9 aa, Homo sapiens
APQTPRPVA

SEQ ID NO: 6714 - protein, 10 aa, Homo sapiens
MPRLFLFHLL

SEQ ID NO: 6715 - protein, 9 aa, Homo sapiens
VPALKDSNL

SEQ ID NO: 6716 - protein, 10 aa, Homo sapiens
RPVAEIVPSF

SEQ ID NO: 6717 - protein, 9 aa, Homo sapiens
MPRLFLFHL

SEQ ID NO: 6718 - protein, 9 aa, Homo sapiens
LPPELKAAL

SEQ ID NO: 6719 - protein, 12 aa, Homo sapiens
MPRLFLFHLLEF

SEQ ID NO: 6720 - protein, 9 aa, Homo sapiens
TPRPVAEIV

SEQ ID NO: 6721 - protein, 10 aa, Homo sapiens
HPSSTKIQKL

SEQ ID NO: 6722 - protein, 8 aa, Homo sapiens
SPDGGKAL

SEQ ID NO: 6723 - protein, 10 aa, Homo sapiens
MPRLFLFHLL

SEQ ID NO: 6724 - protein, 9 aa, Homo sapiens
MPRLFLFHL

SEQ ID NO: 6725 - protein, 10 aa, Homo sapiens
QKKRRPYVAL

SEQ ID NO: 6726 - protein, 11 aa, Homo sapiens
SQKKRRPYVAL

SEQ ID NO: 6727 - protein, 9 aa, Homo sapiens
SQKKRRPYV

SEQ ID NO: 6728 - protein, 12 aa, Homo sapiens
HSQKKRRPYVAL

SEQ ID NO: 6729 - protein, 9 aa, Homo sapiens
ELQQYVPAL

SEQ ID NO: 6730 - protein, 12 aa, Homo sapiens
MPRLFLFHLLEF

SEQ ID NO: 6731 - protein, 9 aa, Homo sapiens
LIRNRQSEA

SEQ ID NO: 6732 - protein, 8 aa, Homo sapiens
DFIQTVSL

SEQ ID NO: 6733 - protein, 8 aa, Homo sapiens
IGCTKRSL

SEQ ID NO: 6734 - protein, 9 aa, Homo sapiens
VIKLCGREL

SEQ ID NO: 6735 - protein, 8 aa, Homo sapiens
ALFEKCCL

SEQ ID NO: 6736 - protein, 8 aa, Homo sapiens
STWSKRSL

SEQ ID NO: 6737 - protein, 8 aa, Homo sapiens
HLLEFCLL

SEQ ID NO: 6738 - protein, 8 aa, Homo sapiens
PPELKAAL

SEQ ID NO: 6739 - protein, 9 aa, Homo sapiens
ALSERQPSL

SEQ ID NO: 6740 - protein, 9 aa, Homo sapiens
LPPELKAAL

SEQ ID NO: 6741 - protein, 10 aa, Homo sapiens
REFLGALSKL

SEQ ID NO: 6742 - protein, 10 aa, Homo sapiens
RELVRAQIAI

SEQ ID NO: 6743 - protein, 10 aa, Homo sapiens
LEFCLLLNQF

SEQ ID NO: 6744 - protein, 9 aa, Homo sapiens
LEFIANLPP

SEQ ID NO: 6745 - protein, 9 aa, Homo sapiens
GDFIQTVSL

SEQ ID NO: 6746 - protein, 11 aa, Homo sapiens
LEFIANLPPEL

SEQ ID NO: 6747 - protein, 11 aa, Homo sapiens
GDFIQTVSLGI

SEQ ID NO: 6748 - protein, 10 aa, Homo sapiens
MLEFIANLPP

SEQ ID NO: 6749 - protein, 11 aa, Homo sapiens
TETIIIMLEFI

SEQ ID NO: 6750 - protein, 9 aa, Homo sapiens
VAGDFIQTV

SEQ ID NO: 6751 - protein, 9 aa, Homo sapiens
ALFEKCCLI

SEQ ID NO: 6752 - protein, 9 aa, Homo sapiens
SLPELQQYV

SEQ ID NO: 6753 - protein, 9 aa, Homo sapiens
QQYVPALKD

SEQ ID NO: 6754 - protein, 9 aa, Homo sapiens
HLLEFCLLL

SEQ ID NO: 6755 - protein, 9 aa, Homo sapiens
RQPSLPELQ

SEQ ID NO: 6756 - protein, 9 aa, Homo sapiens
RLFLFHLLE

SEQ ID NO: 6757 - protein, 8 aa, Homo sapiens
AGDFIQTV

SEQ ID NO: 6758 - protein, 8 aa, Homo sapiens
RLFLFHLL

SEQ ID NO: 6759 - protein, 9 aa, Homo sapiens
FTREFLGAL

SEQ ID NO: 6760 - protein, 9 aa, Homo sapiens
FIANLPPEL

SEQ ID NO: 6761 - protein, 9 aa, Homo sapiens
IAICGMSTW

SEQ ID NO: 6762 - protein, 9 aa, Homo sapiens
FINKDTETI

SEQ ID NO: 6763 - protein, 9 aa, Homo sapiens
FSRAVAAKW

SEQ ID NO: 6764 - protein, 9 aa, Homo sapiens
FLGALSKLY

SEQ ID NO: 6765 - protein, 9 aa, Homo sapiens
ALKDSNLSF

SEQ ID NO: 6766 - protein, 9 aa, Homo sapiens
KALRTGSCF

SEQ ID NO: 6767 - protein, 9 aa, Homo sapiens
CTKRSLAKY

SEQ ID NO: 6768 - protein, 9 aa, Homo sapiens
ISPDGGKAL

SEQ ID NO: 6769 - protein, 9 aa, Homo sapiens
VAGDFIQTV

SEQ ID NO: 6770 - protein, 9 aa, Homo sapiens
VIKLCGREL

SEQ ID NO: 6771 - protein, 9 aa, Homo sapiens
PVAEIVPSF

SEQ ID NO: 6772 - protein, 8 aa, Homo sapiens
SLPELQQY

SEQ ID NO: 6773 - protein, 8 aa, Homo sapiens
TIIIMLEF

SEQ ID NO: 6774 - protein, 8 aa, Homo sapiens
FLFHLLEF

SEQ ID NO: 6775 - protein, 9 aa, Homo sapiens
FIANLPPEL

SEQ ID NO: 6776 - protein, 9 aa, Homo sapiens
ISPDGGKAL

SEQ ID NO: 6777 - protein, 9 aa, Homo sapiens
FTREFLGAL

SEQ ID NO: 6778 - protein, 9 aa, Homo sapiens
IMLEFIANL

SEQ ID NO: 6779 - protein, 9 aa, Homo sapiens
MSTWSKRSL

SEQ ID NO: 6780 - protein, 9 aa, Homo sapiens
SLPELQQYV

SEQ ID NO: 6781 - protein, 9 aa, Homo sapiens
AADSNPSEL

SEQ ID NO: 6782 - protein, 9 aa, Homo sapiens
ALSERQPSL

SEQ ID NO: 6783 - protein, 9 aa, Homo sapiens
FIQTVSLGI

SEQ ID NO: 6784 - protein, 10 aa, Homo sapiens
NLPPELKAAL

SEQ ID NO: 6785 - protein, 9 aa, Homo sapiens
LPPELKAAL

SEQ ID NO: 6786 - protein, 9 aa, Homo sapiens
SNPSELKYL

SEQ ID NO: 6787 - protein, 8 aa, Homo sapiens
RQPSLPEL

SEQ ID NO: 6788 - protein, 9 aa, Homo sapiens
DAPQTPRPV

SEQ ID NO: 6789 - protein, 9 aa, Homo sapiens
FIANLPPEL

SEQ ID NO: 6790 - protein, 9 aa, Homo sapiens
FTREFLGAL

SEQ ID NO: 6791 - protein, 9 aa, Homo sapiens
MSTWSKRSL

SEQ ID NO: 6792 - protein, 9 aa, Homo sapiens
AADSNPSEL

SEQ ID NO: 6793 - protein, 9 aa, Homo sapiens
FINKDTETI

SEQ ID NO: 6794 - protein, 9 aa, Homo sapiens
IAICGMSTW

SEQ ID NO: 6795 - protein, 9 aa, Homo sapiens
RAQIAICGM

SEQ ID NO: 6796 - protein, 9 aa, Homo sapiens
ISPDGGKAL

SEQ ID NO: 6797 - protein, 9 aa, Homo sapiens
LSFEEFKKL

SEQ ID NO: 6798 - protein, 8 aa, Homo sapiens
IANLPPEL

SEQ ID NO: 6799 - protein, 10 aa, Homo sapiens
EAADSNPSEL

SEQ ID NO: 6800 - protein, 9 aa, Homo sapiens
FIANLPPEL

SEQ ID NO: 6801 - protein, 9 aa, Homo sapiens
AADSNPSEL

SEQ ID NO: 6802 - protein, 9 aa, Homo sapiens
SLPELQQYV

SEQ ID NO: 6803 - protein, 9 aa, Homo sapiens
LYHPSSTKI

SEQ ID NO: 6804 - protein, 9 aa, Homo sapiens
FIQTVSLGI

SEQ ID NO: 6805 - protein, 9 aa, Homo sapiens
KRRPYVALF

SEQ ID NO: 6806 - protein, 9 aa, Homo sapiens
SFEEFKKLI

SEQ ID NO: 6807 - protein, 10 aa, Homo sapiens
FHLLEFCLLL

SEQ ID NO: 6808 - protein, 9 aa, Homo sapiens
FHLLEFCLL

SEQ ID NO: 6809 - protein, 8 aa, Homo sapiens
SFEEFKKL

SEQ ID NO: 6810 - protein, 8 aa, Homo sapiens
WKDDVIKL

SEQ ID NO: 6811 - protein, 8 aa, Homo sapiens
IANLPPEL

SEQ ID NO: 6812 - protein, 9 aa, Homo sapiens
LFHLLEFCL

SEQ ID NO: 6813 - protein, 9 aa, Homo sapiens
LFLFHLLEF

SEQ ID NO: 6814 - protein, 9 aa, Homo sapiens
EFCLLLNQF

SEQ ID NO: 6815 - protein, 8 aa, Homo sapiens
DFIQTVSL

SEQ ID NO: 6816 - protein, 9 aa, Homo sapiens
KRRPYVALF

SEQ ID NO: 6817 - protein, 9 aa, Homo sapiens
ERQPSLPEL

SEQ ID NO: 6818 - protein, 9 aa, Homo sapiens
LYHPSSTKI

SEQ ID NO: 6819 - protein, 10 aa, Homo sapiens
KKRRPYVALF

SEQ ID NO: 6820 - protein, 10 aa, Homo sapiens
VRAQIAICGM

SEQ ID NO: 6821 - protein, 9 aa, Homo sapiens
FTREFLGAL

SEQ ID NO: 6822 - protein, 8 aa, Homo sapiens
RRPYVALF

SEQ ID NO: 6823 - protein, 9 aa, Homo sapiens
FIANLPPEL

SEQ ID NO: 6824 - protein, 10 aa, Homo sapiens
MPRLFLFHLL

SEQ ID NO: 6825 - protein, 8 aa, Homo sapiens
KRRPYVAL

SEQ ID NO: 6826 - protein, 9 aa, Homo sapiens
GDFIQTVSL

SEQ ID NO: 6827 - protein, 8 aa, Homo sapiens
TPRPVAGD

SEQ ID NO: 6828 - protein, 8 aa, Homo sapiens
STWSKRSL

SEQ ID NO: 6829 - protein, 9 aa, Homo sapiens
RRPYVALFE

SEQ ID NO: 6830 - protein, 8 aa, Homo sapiens
KRSLSQED

SEQ ID NO: 6831 - protein, 9 aa, Homo sapiens
LIGCTKRSL

SEQ ID NO: 6832 - protein, 9 aa, Homo sapiens
KRRPYVALF

SEQ ID NO: 6833 - protein, 9 aa, Homo sapiens
LYHPSSTKI

SEQ ID NO: 6834 - protein, 10 aa, Homo sapiens
KKRRPYVALF

SEQ ID NO: 6835 - protein, 9 aa, Homo sapiens
ERQPSLPEL

SEQ ID NO: 6836 - protein, 8 aa, Homo sapiens
RRPYVALF

SEQ ID NO: 6837 - protein, 9 aa, Homo sapiens
FHLLEFCLL

SEQ ID NO: 6838 - protein, 9 aa, Homo sapiens
FTREFLGAL

SEQ ID NO: 6839 - protein, 9 aa, Homo sapiens
FIANLPPEL

SEQ ID NO: 6840 - protein, 12 aa, Homo sapiens
SQKKRRPYVALF

SEQ ID NO: 6841 - protein, 8 aa, Homo sapiens
KRRPYVAL

SEQ ID NO: 6842 - protein, 9 aa, Homo sapiens
ISPDGGKAL

SEQ ID NO: 6843 - protein, 9 aa, Homo sapiens
KWKDDVIKL

SEQ ID NO: 6844 - protein, 9 aa, Homo sapiens
KKRRPYVAL

SEQ ID NO: 6845 - protein, 8 aa, Homo sapiens
IANLPPEL

SEQ ID NO: 6846 - protein, 10 aa, Homo sapiens
FSEGAQHGPY

SEQ ID NO: 6847 - protein, 12 aa, Homo sapiens
FTGYLDTPVVSY

SEQ ID NO: 6848 - protein, 10 aa, Homo sapiens
FPSEFQPQPY

SEQ ID NO: 6849 - protein, 9 aa, Homo sapiens
YLDTPVVSY

SEQ ID NO: 6850 - protein, 9 aa, Homo sapiens
PSELGFPHY

SEQ ID NO: 6851 - protein, 9 aa, Homo sapiens
YSDESRMQV

SEQ ID NO: 6852 - protein, 9 aa, Homo sapiens
SLYEHLVNL

SEQ ID NO: 6853 - protein, 9 aa, Homo sapiens
LLMPQVFQA

SEQ ID NO: 6854 - protein, 10 aa, Homo sapiens
SLYEHLVNLL

SEQ ID NO: 6855 - protein, 10 aa, Homo sapiens
GLPWTRLPHV

SEQ ID NO: 6856 - protein, 10 aa, Homo sapiens
LSLYEHLVNL

SEQ ID NO: 6857 - protein, 9 aa, Homo sapiens
HLAPWTTRL

SEQ ID NO: 6858 - protein, 10 aa, Homo sapiens
TQWEWFHPKL

SEQ ID NO: 6859 - protein, 9 aa, Homo sapiens
SMANWVHHT

SEQ ID NO: 6860 - protein, 10 aa, Homo sapiens
NLWPGAYAYA

SEQ ID NO: 6861 - protein, 10 aa, Homo sapiens
NLLMPQVFQA

SEQ ID NO: 6862 - protein, 10 aa, Homo sapiens
SLCPQYSVAV

SEQ ID NO: 6863 - protein, 9 aa, Homo sapiens
KADEGPEEV

SEQ ID NO: 6864 - protein, 9 aa, Homo sapiens
YLDTPVVSY

SEQ ID NO: 6865 - protein, 9 aa, Homo sapiens
ALQFLPSEL

SEQ ID NO: 6866 - protein, 10 aa, Homo sapiens
RLGGMEYPSV

SEQ ID NO: 6867 - protein, 9 aa, Homo sapiens
SLSQQENLL

SEQ ID NO: 6868 - protein, 9 aa, Homo sapiens
GAYAYASGK

SEQ ID NO: 6869 - protein, 10 aa, Homo sapiens
RCTWVNPLQK

SEQ ID NO: 6870 - protein, 12 aa, Homo sapiens
SLYEHLVNLLTK

SEQ ID NO: 6871 - protein, 10 aa, Homo sapiens
GAYAYASGKK

SEQ ID NO: 6872 - protein, 9 aa, Homo sapiens
CTWVNPLQK

SEQ ID NO: 6873 - protein, 11 aa, Homo sapiens
SVWKPPPVIPK

SEQ ID NO: 6874 - protein, 11 aa, Homo sapiens
STRPCQPPFNK

SEQ ID NO: 6875 - protein, 10 aa, Homo sapiens
VWKPPPVIPK

SEQ ID NO: 6876 - protein, 10 aa, Homo sapiens
TTQWEWFHPK

SEQ ID NO: 6877 - protein, 9 aa, Homo sapiens
TQWEWFHPK

SEQ ID NO: 6878 - protein, 9 aa, Homo sapiens
GAYAYASGK

SEQ ID NO: 6879 - protein, 9 aa, Homo sapiens
CTWVNPLQK

SEQ ID NO: 6880 - protein, 11 aa, Homo sapiens
SVWKPPPVIPK

SEQ ID NO: 6881 - protein, 11 aa, Homo sapiens
STRPCQPPFNK

SEQ ID NO: 6882 - protein, 11 aa, Homo sapiens
RTTQWEWFHPK

SEQ ID NO: 6883 - protein, 9 aa, Homo sapiens
SYLVAEVEF

SEQ ID NO: 6884 - protein, 10 aa, Homo sapiens
RSYLVAEVEF

SEQ ID NO: 6885 - protein, 10 aa, Homo sapiens
MEYPSVNTGF

SEQ ID NO: 6886 - protein, 9 aa, Homo sapiens
LFQQLDPTF

SEQ ID NO: 6887 - protein, 9 aa, Homo sapiens
EYPSVNTGF

SEQ ID NO: 6888 - protein, 9 aa, Homo sapiens
IYIGWGHKY

SEQ ID NO: 6889 - protein, 11 aa, Homo sapiens
PYIRDDPALQF

SEQ ID NO: 6890 - protein, 10 aa, Homo sapiens
KIKKFFTGYL

SEQ ID NO: 6891 - protein, 9 aa, Homo sapiens
SFRIFLAMK

SEQ ID NO: 6892 - protein, 9 aa, Homo sapiens
STRPCQPPF

SEQ ID NO: 6893 - protein, 9 aa, Homo sapiens
GAYAYASGK

SEQ ID NO: 6894 - protein, 9 aa, Homo sapiens
KIKKFFTGY

SEQ ID NO: 6895 - protein, 9 aa, Homo sapiens
CTWVNPLQK

SEQ ID NO: 6896 - protein, 9 aa, Homo sapiens
KFENIYIGW

SEQ ID NO: 6897 - protein, 9 aa, Homo sapiens
YAYASGNLR

SEQ ID NO: 6898 - protein, 9 aa, Homo sapiens
STAPRASTR

SEQ ID NO: 6899 - protein, 10 aa, Homo sapiens
WFHPKLDTLR

SEQ ID NO: 6900 - protein, 10 aa, Homo sapiens
HTQHILPQGR

SEQ ID NO: 6901 - protein, 9 aa, Homo sapiens
QASQRRHSR

SEQ ID NO: 6902 - protein, 9 aa, Homo sapiens
EQQPIHTCR

SEQ ID NO: 6903 - protein, 9 aa, Homo sapiens
EKQKALFTR

SEQ ID NO: 6904 - protein, 9 aa, Homo sapiens
MHLAPWTTR

SEQ ID NO: 6905 - protein, 10 aa, Homo sapiens
APGWSQRGSL

SEQ ID NO: 6906 - protein, 9 aa, Homo sapiens
APRASTRPC

SEQ ID NO: 6907 - protein, 9 aa, Homo sapiens
RPEDPLSVL

SEQ ID NO: 6908 - protein, 11 aa, Homo sapiens
APWTTRLSCSL

SEQ ID NO: 6909 - protein, 9 aa, Homo sapiens
SPESFNPAL

SEQ ID NO: 6910 - protein, 10 aa, Homo sapiens
YPSGPEIMEM

SEQ ID NO: 6911 - protein, 9 aa, Homo sapiens
ILGIKRSYL

SEQ ID NO: 6912 - protein, 12 aa, Homo sapiens
YLRAQIARISAA

SEQ ID NO: 6913 - protein, 10 aa, Homo sapiens
YKMAEKQKAL

SEQ ID NO: 6914 - protein, 12 aa, Homo sapiens
WGKILGIKRSYL

SEQ ID NO: 6915 - protein, 9 aa, Homo sapiens
KMAEKQKAL

SEQ ID NO: 6916 - protein, 8 aa, Homo sapiens
EGIPVLEL

SEQ ID NO: 6917 - protein, 9 aa, Homo sapiens
DPLSVLESL

SEQ ID NO: 6918 - protein, 9 aa, Homo sapiens
WFHPKLDTL

SEQ ID NO: 6919 - protein, 8 aa, Homo sapiens
DIVPKSVW

SEQ ID NO: 6920 - protein, 10 aa, Homo sapiens
CDLSLYEHLV

SEQ ID NO: 6921 - protein, 10 aa, Homo sapiens
FEGIPVLELV

SEQ ID NO: 6922 - protein, 10 aa, Homo sapiens
TQWEWFHPKL

SEQ ID NO: 6923 - protein, 9 aa, Homo sapiens
CSLCPQYSV

SEQ ID NO: 6924 - protein, 9 aa, Homo sapiens
AQIVNARKI

SEQ ID NO: 6925 - protein, 9 aa, Homo sapiens
HLVNLLTKI

SEQ ID NO: 6926 - protein, 9 aa, Homo sapiens
GQFNLYQTD

SEQ ID NO: 6927 - protein, 9 aa, Homo sapiens
GQSSLFQQL

SEQ ID NO: 6928 - protein, 9 aa, Homo sapiens
YAYASGKKF

SEQ ID NO: 6929 - protein, 9 aa, Homo sapiens
LAVQNAKAY

SEQ ID NO: 6930 - protein, 9 aa, Homo sapiens
SAATQVSPL

SEQ ID NO: 6931 - protein, 9 aa, Homo sapiens
RSNLWPGAY

SEQ ID NO: 6932 - protein, 9 aa, Homo sapiens
HSRDQAQAL

SEQ ID NO: 6933 - protein, 9 aa, Homo sapiens
YLDTPVVSY

SEQ ID NO: 6934 - protein, 9 aa, Homo sapiens
EARLGGMEY

SEQ ID NO: 6935 - protein, 9 aa, Homo sapiens
NLWPGAYAY

SEQ ID NO: 6936 - protein, 9 aa, Homo sapiens
SLYEHLVNL

SEQ ID NO: 6937 - protein, 10 aa, Homo sapiens
YSPESFNPAL

SEQ ID NO: 6938 - protein, 9 aa, Homo sapiens
VGPPLLTPL

SEQ ID NO: 6939 - protein, 9 aa, Homo sapiens
HLAPWTTRL

SEQ ID NO: 6940 - protein, 9 aa, Homo sapiens
ILPQGRCTW

SEQ ID NO: 6941 - protein, 11 aa, Homo sapiens
NAPGWSQRGSL

SEQ ID NO: 6942 - protein, 9 aa, Homo sapiens
YAYASGKKF

SEQ ID NO: 6943 - protein, 9 aa, Homo sapiens
SAATQVSPL

SEQ ID NO: 6944 - protein, 9 aa, Homo sapiens
FQEPPVNPL

SEQ ID NO: 6945 - protein, 9 aa, Homo sapiens
TSINCDLSL

SEQ ID NO: 6946 - protein, 9 aa, Homo sapiens
QVAELTTSL

SEQ ID NO: 6947 - protein, 8 aa, Homo sapiens
YAYASGNL

SEQ ID NO: 6948 - protein, 9 aa, Homo sapiens
FEGIPVLEL

SEQ ID NO: 6949 - protein, 9 aa, Homo sapiens
IRDDPALQF

SEQ ID NO: 6950 - protein, 9 aa, Homo sapiens
FQEPPVNPL

SEQ ID NO: 6951 - protein, 9 aa, Homo sapiens
YSDESRMQV

SEQ ID NO: 6952 - protein, 9 aa, Homo sapiens
LYEHLVNLL

SEQ ID NO: 6953 - protein, 9 aa, Homo sapiens
SYLVAEVEF

SEQ ID NO: 6954 - protein, 8 aa, Homo sapiens
LYEHLVNL

SEQ ID NO: 6955 - protein, 9 aa, Homo sapiens
YLDTPVVSY

SEQ ID NO: 6956 - protein, 9 aa, Homo sapiens
SRSGANKYL

SEQ ID NO: 6957 - protein, 10 aa, Homo sapiens
FRIFLAMKQL

SEQ ID NO: 6958 - protein, 10 aa, Homo sapiens
CRFWGKILGI

SEQ ID NO: 6959 - protein, 9 aa, Homo sapiens
KRSYLVAEV

SEQ ID NO: 6960 - protein, 8 aa, Homo sapiens
SRMQVAEL

SEQ ID NO: 6961 - protein, 9 aa, Homo sapiens
PDFEGIPVL

SEQ ID NO: 6962 - protein, 9 aa, Homo sapiens
PSGPEIMEM

SEQ ID NO: 6963 - protein, 9 aa, Homo sapiens
QHGPYIRDD

SEQ ID NO: 6964 - protein, 9 aa, Homo sapiens
WFHPKLDTL

SEQ ID NO: 6965 - protein, 9 aa, Homo sapiens
IYIGWGHKY

SEQ ID NO: 6966 - protein, 9 aa, Homo sapiens
YAYASGKKF

SEQ ID NO: 6967 - protein, 9 aa, Homo sapiens
IRDDPALQF

SEQ ID NO: 6968 - protein, 10 aa, Homo sapiens
VRSNLWPGAY

SEQ ID NO: 6969 - protein, 10 aa, Homo sapiens
QRPEDPLSVL

SEQ ID NO: 6970 - protein, 9 aa, Homo sapiens
ETLRLASSY

SEQ ID NO: 6971 - protein, 10 aa, Homo sapiens
IETLRLASSY

SEQ ID NO: 6972 - protein, 9 aa, Homo sapiens
RTNSVNTAF

SEQ ID NO: 6973 - protein, 9 aa, Homo sapiens
PTEPADRKL

SEQ ID NO: 6974 - protein, 10 aa, Homo sapiens
GSDSSGSDEK

SEQ ID NO: 6975 - protein, 9 aa, Homo sapiens
YLYPEVSPL

SEQ ID NO: 6976 - protein, 10 aa, Homo sapiens
RYLYPEVSPL

SEQ ID NO: 6977 - protein, 10 aa, Homo sapiens
YLYPEVSPLS

SEQ ID NO: 6978 - protein, 10 aa, Homo sapiens
RLASSYISHL

SEQ ID NO: 6979 - protein, 10 aa, Homo sapiens
YISHLGNVLL

SEQ ID NO: 6980 - protein, 11 aa, Homo sapiens
GRYLYPEVSPL

SEQ ID NO: 6981 - protein, 12 aa, Homo sapiens
PGRYLYPEVSPL

SEQ ID NO: 6982 - protein, 9 aa, Homo sapiens
MSFATLRPA

SEQ ID NO: 6983 - protein, 11 aa, Homo sapiens
YLYPEVSPLSE

SEQ ID NO: 6984 - protein, 9 aa, Homo sapiens
GSDEKPCRV

SEQ ID NO: 6985 - protein, 9 aa, Homo sapiens
TLIPTEPAD

SEQ ID NO: 6986 - protein, 9 aa, Homo sapiens
GLQGARRRA

SEQ ID NO: 6987 - protein, 8 aa, Homo sapiens
YLYPEVSP

SEQ ID NO: 6988 - protein, 10 aa, Homo sapiens
CLSNQRKLSK

SEQ ID NO: 6989 - protein, 9 aa, Homo sapiens
RLASSYISH

SEQ ID NO: 6990 - protein, 9 aa, Homo sapiens
LSNQRKLSK

SEQ ID NO: 6991 - protein, 9 aa, Homo sapiens
YLYPEVSPL

SEQ ID NO: 6992 - protein, 10 aa, Homo sapiens
TLRPAPPGRY

SEQ ID NO: 6993 - protein, 10 aa, Homo sapiens
ATLRPAPPGR

SEQ ID NO: 6994 - protein, 12 aa, Homo sapiens
RTLIPTEPADRK

SEQ ID NO: 6995 - protein, 9 aa, Homo sapiens
LSNQRKLSK

SEQ ID NO: 6996 - protein, 10 aa, Homo sapiens
CLSNQRKLSK

SEQ ID NO: 6997 - protein, 9 aa, Homo sapiens
RLASSYISH

SEQ ID NO: 6998 - protein, 9 aa, Homo sapiens
SDSSGSDEK

SEQ ID NO: 6999 - protein, 9 aa, Homo sapiens
SYISHLGNV

SEQ ID NO: 7000 - protein, 10 aa, Homo sapiens
SYISHLGNVL

SEQ ID NO: 7001 - protein, 10 aa, Homo sapiens
RYLYPEVSPL

SEQ ID NO: 7002 - protein, 11 aa, Homo sapiens
SYISHLGNVLL

SEQ ID NO: 7003 - protein, 9 aa, Homo sapiens
LYPEVSPLS

SEQ ID NO: 7004 - protein, 9 aa, Homo sapiens
RVHAARCGL

SEQ ID NO: 7005 - protein, 9 aa, Homo sapiens
MSFATLRPA

SEQ ID NO: 7006 - protein, 9 aa, Homo sapiens
RTLIPTEPA

SEQ ID NO: 7007 - protein, 12 aa, Homo sapiens
KIETLRLASSYI

SEQ ID NO: 7008 - protein, 9 aa, Homo sapiens
RPAPPGRYL

SEQ ID NO: 7009 - protein, 9 aa, Homo sapiens
SYISHLGNV

SEQ ID NO: 7010 - protein, 11 aa, Homo sapiens
HSGPAFFHAAR

SEQ ID NO: 7011 - protein, 10 aa, Homo sapiens
SGPAFFHAAR

SEQ ID NO: 7012 - protein, 9 aa, Homo sapiens
TLRPAPPGR

SEQ ID NO: 7013 - protein, 8 aa, Homo sapiens
HTANARER

SEQ ID NO: 7014 - protein, 9 aa, Homo sapiens
TANARERDR

SEQ ID NO: 7015 - protein, 9 aa, Homo sapiens
ETLRLASSY

SEQ ID NO: 7016 - protein, 9 aa, Homo sapiens
RPAPPGRYL

SEQ ID NO: 7017 - protein, 10 aa, Homo sapiens
LRPAPPGRYL

SEQ ID NO: 7018 - protein, 10 aa, Homo sapiens
RPAPPGRYLY

SEQ ID NO: 7019 - protein, 9 aa, Homo sapiens
QPCHSGPAF

SEQ ID NO: 7020 - protein, 10 aa, Homo sapiens
EPRQRHTANA

SEQ ID NO: 7021 - protein, 9 aa, Homo sapiens
YLYPEVSPL

SEQ ID NO: 7022 - protein, 8 aa, Homo sapiens
EPRQRHTA

SEQ ID NO: 7023 - protein, 9 aa, Homo sapiens
EPRQRHTAN

SEQ ID NO: 7024 - protein, 9 aa, Homo sapiens
EPADRKLSK

SEQ ID NO: 7025 - protein, 8 aa, Homo sapiens
QPKQICTF

SEQ ID NO: 7026 - protein, 9 aa, Homo sapiens
MSFATLRPA

SEQ ID NO: 7027 - protein, 10 aa, Homo sapiens
SSYISHLGNV

SEQ ID NO: 7028 - protein, 9 aa, Homo sapiens
HSGPAFFHA

SEQ ID NO: 7029 - protein, 9 aa, Homo sapiens
YLYPEVSPL

SEQ ID NO: 7030 - protein, 8 aa, Homo sapiens
HLGNVLLA

SEQ ID NO: 7031 - protein, 9 aa, Homo sapiens
RERDRTNSV

SEQ ID NO: 7032 - protein, 9 aa, Homo sapiens
YLYPEVSPL

SEQ ID NO: 7033 - protein, 9 aa, Homo sapiens
YISHLGNVL

SEQ ID NO: 7034 - protein, 9 aa, Homo sapiens
RTNSVNTAF

SEQ ID NO: 7035 - protein, 9 aa, Homo sapiens
RLASSYISH

SEQ ID NO: 7036 - protein, 8 aa, Homo sapiens
YLYPEVSP

SEQ ID NO: 7037 - protein, 9 aa, Homo sapiens
YLYPEVSPL

SEQ ID NO: 7038 - protein, 9 aa, Homo sapiens
YISHLGNVL

SEQ ID NO: 7039 - protein, 9 aa, Homo sapiens
ISHLGNVLL

SEQ ID NO: 7040 - protein, 8 aa, Homo sapiens
LYPEVSPL

SEQ ID NO: 7041 - protein, 8 aa, Homo sapiens
PAPPGRYL

SEQ ID NO: 7042 - protein, 9 aa, Homo sapiens
YLYPEVSPL

SEQ ID NO: 7043 - protein, 9 aa, Homo sapiens
LASSYISHL

SEQ ID NO: 7044 - protein, 9 aa, Homo sapiens
YISHLGNVL

SEQ ID NO: 7045 - protein, 9 aa, Homo sapiens
RPAPPGRYL

SEQ ID NO: 7046 - protein, 9 aa, Homo sapiens
RTNSVNTAF

SEQ ID NO: 7047 - protein, 9 aa, Homo sapiens
YLYPEVSPL

SEQ ID NO: 7048 - protein, 8 aa, Homo sapiens
LYPEVSPL

SEQ ID NO: 7049 - protein, 9 aa, Homo sapiens
ISHLGNVLL

SEQ ID NO: 7050 - protein, 10 aa, Homo sapiens
LRPAPPGRYL

SEQ ID NO: 7051 - protein, 10 aa, Homo sapiens
CRVHAARCGL

SEQ ID NO: 7052 - protein, 9 aa, Homo sapiens
SYISHLGNV

SEQ ID NO: 7053 - protein, 9 aa, Homo sapiens
LRPAPPGRY

SEQ ID NO: 7054 - protein, 9 aa, Homo sapiens
RPAPPGRYL

SEQ ID NO: 7055 - protein, 9 aa, Homo sapiens
YLYPEVSPL

SEQ ID NO: 7056 - protein, 9 aa, Homo sapiens
RYLYPEVSP

SEQ ID NO: 7057 - protein, 9 aa, Homo sapiens
SYISHLGNV

SEQ ID NO: 7058 - protein, 9 aa, Homo sapiens
YLYPEVSPL

SEQ ID NO: 7059 - protein, 10 aa, Homo sapiens
LRPAPPGRYL

SEQ ID NO: 7060 - protein, 8 aa, Homo sapiens
LYPEVSPL

SEQ ID NO: 7061 - protein, 9 aa, Homo sapiens
LRPAPPGRY

SEQ ID NO: 7062 - protein, 10 aa, Homo sapiens
FTFNLANALY

SEQ ID NO: 7063 - protein, 9 aa, Homo sapiens
NTEFAVDLY

SEQ ID NO: 7064 - protein, 9 aa, Homo sapiens
KVDFKDVLY

SEQ ID NO: 7065 - protein, 8 aa, Homo sapiens
FSESSLNY

SEQ ID NO: 7066 - protein, 9 aa, Homo sapiens
FVLKSFFSA

SEQ ID NO: 7067 - protein, 8 aa, Homo sapiens
YLQEGFTV

SEQ ID NO: 7068 - protein, 10 aa, Homo sapiens
FIANHPFLFI

SEQ ID NO: 7069 - protein, 8 aa, Homo sapiens
FLWSLLLL

SEQ ID NO: 7070 - protein, 10 aa, Homo sapiens
ALYLQEGFTV

SEQ ID NO: 7071 - protein, 10 aa, Homo sapiens
FVLKSFFSAI

SEQ ID NO: 7072 - protein, 10 aa, Homo sapiens
VLYSLNITEI

SEQ ID NO: 7073 - protein, 10 aa, Homo sapiens
WLSEMQEEEV

SEQ ID NO: 7074 - protein, 9 aa, Homo sapiens
SLNYQVLEL

SEQ ID NO: 7075 - protein, 9 aa, Homo sapiens
FLWSLLLLF

SEQ ID NO: 7076 - protein, 9 aa, Homo sapiens
TLVLEMVQL

SEQ ID NO: 7077 - protein, 9 aa, Homo sapiens
YLQEGFTVK

SEQ ID NO: 7078 - protein, 10 aa, Homo sapiens
KSFFSAISEK

SEQ ID NO: 7079 - protein, 10 aa, Homo sapiens
KLITAQQILK

SEQ ID NO: 7080 - protein, 9 aa, Homo sapiens
AIYFKGDWK

SEQ ID NO: 7081 - protein, 11 aa, Homo sapiens
ALYLQEGFTVK

SEQ ID NO: 7082 - protein, 9 aa, Homo sapiens
STVKIPMMK

SEQ ID NO: 7083 - protein, 10 aa, Homo sapiens
KSFFSAISEK

SEQ ID NO: 7084 - protein, 9 aa, Homo sapiens
AIYFKGDWK

SEQ ID NO: 7085 - protein, 11 aa, Homo sapiens
TSAGEEFFVLK

SEQ ID NO: 7086 - protein, 9 aa, Homo sapiens
AGEEFFVLK

SEQ ID NO: 7087 - protein, 10 aa, Homo sapiens
QFIANHPFLF

SEQ ID NO: 7088 - protein, 10 aa, Homo sapiens
LYSLNITEIF

SEQ ID NO: 7089 - protein, 9 aa, Homo sapiens
LYLQEGFTV

SEQ ID NO: 7090 - protein, 11 aa, Homo sapiens
IYFKGDWKQKF

SEQ ID NO: 7091 - protein, 9 aa, Homo sapiens
QYLHGNKEF

SEQ ID NO: 7092 - protein, 9 aa, Homo sapiens
MMKALLRTK

SEQ ID NO: 7093 - protein, 9 aa, Homo sapiens
RTKYGYFSE

SEQ ID NO: 7094 - protein, 10 aa, Homo sapiens
KSFFSAISEK

SEQ ID NO: 7095 - protein, 9 aa, Homo sapiens
YFKGDWKQK

SEQ ID NO: 7096 - protein, 9 aa, Homo sapiens
SFFSAISEK

SEQ ID NO: 7097 - protein, 9 aa, Homo sapiens
EMISTWVER

SEQ ID NO: 7098 - protein, 9 aa, Homo sapiens
LFFGSQASR

SEQ ID NO: 7099 - protein, 10 aa, Homo sapiens
LLFFGSQASR

SEQ ID NO: 7100 - protein, 8 aa, Homo sapiens
DTQEIKGR

SEQ ID NO: 7101 - protein, 8 aa, Homo sapiens
ESILFMGR

SEQ ID NO: 7102 - protein, 9 aa, Homo sapiens
SPLGITLVL

SEQ ID NO: 7103 - protein, 8 aa, Homo sapiens
IPMMKALL

SEQ ID NO: 7104 - protein, 10 aa, Homo sapiens
FSPLGITLVL

SEQ ID NO: 7105 - protein, 8 aa, Homo sapiens
GPLTRLVL

SEQ ID NO: 7106 - protein, 9 aa, Homo sapiens
LLRTKYGYF

SEQ ID NO: 7107 - protein, 9 aa, Homo sapiens
VLKSFFSAI

SEQ ID NO: 7108 - protein, 8 aa, Homo sapiens
IPMMKALL

SEQ ID NO: 7109 - protein, 8 aa, Homo sapiens
DLYQEVSL

SEQ ID NO: 7110 - protein, 9 aa, Homo sapiens
AISEKKQEF

SEQ ID NO: 7111 - protein, 8 aa, Homo sapiens
HIPVIMSL

SEQ ID NO: 7112 - protein, 9 aa, Homo sapiens
KDVLYSLNI

SEQ ID NO: 7113 - protein, 11 aa, Homo sapiens
MDTIFLWSLLL

SEQ ID NO: 7114 - protein, 10 aa, Homo sapiens
MDTIFLWSLL

SEQ ID NO: 7115 - protein, 9 aa, Homo sapiens
YVSQVTQKV

SEQ ID NO: 7116 - protein, 9 aa, Homo sapiens
AQQQIRQTL

SEQ ID NO: 7117 - protein, 9 aa, Homo sapiens
AQKNTEFAV

SEQ ID NO: 7118 - protein, 9 aa, Homo sapiens
FTFNLANAL

SEQ ID NO: 7119 - protein, 9 aa, Homo sapiens
FIANHPFLF

SEQ ID NO: 7120 - protein, 9 aa, Homo sapiens
YSLNITEIF

SEQ ID NO: 7121 - protein, 10 aa, Homo sapiens
FTFNLANALY

SEQ ID NO: 7122 - protein, 9 aa, Homo sapiens
FAVDLYQEV

SEQ ID NO: 7123 - protein, 9 aa, Homo sapiens
TSAEKKQEF

SEQ ID NO: 7124 - protein, 9 aa, Homo sapiens
VTNPDTQEI

SEQ ID NO: 7125 - protein, 9 aa, Homo sapiens
FTFNLANAL

SEQ ID NO: 7126 - protein, 9 aa, Homo sapiens
FGPLTRLVL

SEQ ID NO: 7127 - protein, 9 aa, Homo sapiens
YGYFSESSL

SEQ ID NO: 7128 - protein, 10 aa, Homo sapiens
FSPLGITLVL

SEQ ID NO: 7129 - protein, 8 aa, Homo sapiens
FSPLGITL

SEQ ID NO: 7130 - protein, 9 aa, Homo sapiens
FTFNLANAL

SEQ ID NO: 7131 - protein, 9 aa, Homo sapiens
FAVDLYQEV

SEQ ID NO: 7132 - protein, 9 aa, Homo sapiens
YGYFSESSL

SEQ ID NO: 7133 - protein, 9 aa, Homo sapiens
IHIPVIMSL

SEQ ID NO: 7134 - protein, 9 aa, Homo sapiens
FIANHPFLF

SEQ ID NO: 7135 - protein, 9 aa, Homo sapiens
YFSESSLNY

SEQ ID NO: 7136 - protein, 9 aa, Homo sapiens
IFSPLGITL

SEQ ID NO: 7137 - protein, 9 aa, Homo sapiens
ITDSSEVYV

SEQ ID NO: 7138 - protein, 10 aa, Homo sapiens
TFNLANALYL

SEQ ID NO: 7139 - protein, 9 aa, Homo sapiens
FRKEDTQLI

SEQ ID NO: 7140 - protein, 9 aa, Homo sapiens
FIANHPFLF

SEQ ID NO: 7141 - protein, 9 aa, Homo sapiens
FTFNLANAL

SEQ ID NO: 7142 - protein, 9 aa, Homo sapiens
SAGEEFFVL

SEQ ID NO: 7143 - protein, 9 aa, Homo sapiens
SLNYQVLEL

SEQ ID NO: 7144 - protein, 8 aa, Homo sapiens
LNYQVLEL

SEQ ID NO: 7145 - protein, 9 aa, Homo sapiens
FRKEDTQLI

SEQ ID NO: 7146 - protein, 9 aa, Homo sapiens
FIANHPFLF

SEQ ID NO: 7147 - protein, 9 aa, Homo sapiens
IHIPVIMSL

SEQ ID NO: 7148 - protein, 9 aa, Homo sapiens
KKQEFTFNL

SEQ ID NO: 7149 - protein, 9 aa, Homo sapiens
SYKGDEFSL

SEQ ID NO: 7150 - protein, 8 aa, Homo sapiens
FRKEDTQL

SEQ ID NO: 7151 - protein, 10 aa, Homo sapiens
FTDFMGQIVY

SEQ ID NO: 7152 - protein, 11 aa, Homo sapiens
FFTDFMGQIVY

SEQ ID NO: 7153 - protein, 9 aa, Homo sapiens
LSSDGMYEY

SEQ ID NO: 7154 - protein, 12 aa, Homo sapiens
LFFTDFMGQIVY

SEQ ID NO: 7155 - protein, 12 aa, Homo sapiens
YSAHNSTEFLIY

SEQ ID NO: 7156 - protein, 9 aa, Homo sapiens
FIDGPIKAY

SEQ ID NO: 7157 - protein, 11 aa, Homo sapiens
YTVPFNLITEY

SEQ ID NO: 7158 - protein, 9 aa, Homo sapiens
FLSPILGFL

SEQ ID NO: 7159 - protein, 9 aa, Homo sapiens
SLYSIVWFL

SEQ ID NO: 7160 - protein, 9 aa, Homo sapiens
FLSNMLFFT

SEQ ID NO: 7161 - protein, 9 aa, Homo sapiens
HLIGWTAFL

SEQ ID NO: 7162 - protein, 9 aa, Homo sapiens
SLYSYFQKV

SEQ ID NO: 7163 - protein, 10 aa, Homo sapiens
FLSPILGFLL

SEQ ID NO: 7164 - protein, 9 aa, Homo sapiens
VMSSTLYTV

SEQ ID NO: 7165 - protein, 9 aa, Homo sapiens
YLLGAIDWA

SEQ ID NO: 7166 - protein, 9 aa, Homo sapiens
LVLCSLFGV

SEQ ID NO: 7167 - protein, 9 aa, Homo sapiens
VMFFFSALV

SEQ ID NO: 7168 - protein, 9 aa, Homo sapiens
RLLGTEFQV

SEQ ID NO: 7169 - protein, 11 aa, Homo sapiens
SLADDGPFDSV

SEQ ID NO: 7170 - protein, 11 aa, Homo sapiens
GMYEYGSIEKV

SEQ ID NO: 7171 - protein, 10 aa, Homo sapiens
FLIYERGVEV

SEQ ID NO: 7172 - protein, 9 aa, Homo sapiens
TLYTVPFNL

SEQ ID NO: 7173 - protein, 10 aa, Homo sapiens
GMYEYGSIEK

SEQ ID NO: 7174 - protein, 10 aa, Homo sapiens
KVLVSYIGLK

SEQ ID NO: 7175 - protein, 10 aa, Homo sapiens
SVFSSLYSCK

SEQ ID NO: 7176 - protein, 9 aa, Homo sapiens
VLVSYIGLK

SEQ ID NO: 7177 - protein, 9 aa, Homo sapiens
ALIANPRRK

SEQ ID NO: 7178 - protein, 9 aa, Homo sapiens
SVFSSLYSY

SEQ ID NO: 7179 - protein, 9 aa, Homo sapiens
SSLYSYFQK

SEQ ID NO: 7180 - protein, 10 aa, Homo sapiens
SVFSSLYSCK

SEQ ID NO: 7181 - protein, 12 aa, Homo sapiens
SVFSSLYSYFQK

SEQ ID NO: 7182 - protein, 9 aa, Homo sapiens
SVFSSLYSY

SEQ ID NO: 7183 - protein, 9 aa, Homo sapiens
STEFLIYER

SEQ ID NO: 7184 - protein, 9 aa, Homo sapiens
RYLCISHLI

SEQ ID NO: 7185 - protein, 9 aa, Homo sapiens
LYFTGYLLF

SEQ ID NO: 7186 - protein, 10 aa, Homo sapiens
GLYFTGYLLF

SEQ ID NO: 7187 - protein, 10 aa, Homo sapiens
YRYLCISHLI

SEQ ID NO: 7188 - protein, 9 aa, Homo sapiens
VFSSLYSYF

SEQ ID NO: 7189 - protein, 9 aa, Homo sapiens
LYTVPFNLI

SEQ ID NO: 7190 - protein, 10 aa, Homo sapiens
SYIGLKGLYF

SEQ ID NO: 7191 - protein, 9 aa, Homo sapiens
GTRRAMTLK

SEQ ID NO: 7192 - protein, 9 aa, Homo sapiens
QTRRAMTLK

SEQ ID NO: 7193 - protein, 11 aa, Homo sapiens
RSRWGRRRPYI

SEQ ID NO: 7194 - protein, 9 aa, Homo sapiens
KVKNGYVNP

SEQ ID NO: 7195 - protein, 9 aa, Homo sapiens
GFIGLFPNV

SEQ ID NO: 7196 - protein, 10 aa, Homo sapiens
RSRWGRRRPY

SEQ ID NO: 7197 - protein, 9 aa, Homo sapiens
GQAGRHIYK

SEQ ID NO: 7198 - protein, 9 aa, Homo sapiens
DFMGQIVYR

SEQ ID NO: 7199 - protein, 9 aa, Homo sapiens
LVNMPPHYR

SEQ ID NO: 7200 - protein, 10 aa, Homo sapiens
TDFMGQIVYR

SEQ ID NO: 7201 - protein, 9 aa, Homo sapiens
STEFLIYER

SEQ ID NO: 7202 - protein, 10 aa, Homo sapiens
HYHALFTGTR

SEQ ID NO: 7203 - protein, 10 aa, Homo sapiens
RPYILTLGVM

SEQ ID NO: 7204 - protein, 11 aa, Homo sapiens
RPTSRLIMHSM

SEQ ID NO: 7205 - protein, 10 aa, Homo sapiens
FPNVYSTLVL

SEQ ID NO: 7206 - protein, 8 aa, Homo sapiens
RPTSRLIM

SEQ ID NO: 7207 - protein, 9 aa, Homo sapiens
QPPHWMDSL

SEQ ID NO: 7208 - protein, 9 aa, Homo sapiens
TPVLLSVGL

SEQ ID NO: 7209 - protein, 10 aa, Homo sapiens
GPDCVPRGSL

SEQ ID NO: 7210 - protein, 9 aa, Homo sapiens
WGRRRPYIL

SEQ ID NO: 7211 - protein, 10 aa, Homo sapiens
NPRRKLVWAI

SEQ ID NO: 7212 - protein, 9 aa, Homo sapiens
RLIMHSMAM

SEQ ID NO: 7213 - protein, 9 aa, Homo sapiens
TLKSLLRAL

SEQ ID NO: 7214 - protein, 9 aa, Homo sapiens
LIYERGVEV

SEQ ID NO: 7215 - protein, 8 aa, Homo sapiens
DGPIKAYL

SEQ ID NO: 7216 - protein, 9 aa, Homo sapiens
TGTRRAMTL

SEQ ID NO: 7217 - protein, 9 aa, Homo sapiens
YEYGSIEKV

SEQ ID NO: 7218 - protein, 12 aa, Homo sapiens
FDFAADFIDGPI

SEQ ID NO: 7219 - protein, 8 aa, Homo sapiens
FDFAADFI

SEQ ID NO: 7220 - protein, 9 aa, Homo sapiens
VEAAYVTPV

SEQ ID NO: 7221 - protein, 9 aa, Homo sapiens
SLYSYFQKV

SEQ ID NO: 7222 - protein, 9 aa, Homo sapiens
RLLGTEFQV

SEQ ID NO: 7223 - protein, 9 aa, Homo sapiens
SLYSIVWFL

SEQ ID NO: 7224 - protein, 9 aa, Homo sapiens
YSAHNSTEF

SEQ ID NO: 7225 - protein, 9 aa, Homo sapiens
FGVMSSTLY

SEQ ID NO: 7226 - protein, 9 aa, Homo sapiens
FLSPILGFL

SEQ ID NO: 7227 - protein, 9 aa, Homo sapiens
SVFSSLYSY

SEQ ID NO: 7228 - protein, 10 aa, Homo sapiens
FTDFMGQIVY

SEQ ID NO: 7229 - protein, 9 aa, Homo sapiens
SSKSFWSST

SEQ ID NO: 7230 - protein, 9 aa, Homo sapiens
FIDGPIKAY

SEQ ID NO: 7231 - protein, 9 aa, Homo sapiens
SMAMFGREF

SEQ ID NO: 7232 - protein, 10 aa, Homo sapiens
ISHLIGWTAF

SEQ ID NO: 7233 - protein, 9 aa, Homo sapiens
FLSPILGFL

SEQ ID NO: 7234 - protein, 9 aa, Homo sapiens
NMPPHYRYL

SEQ ID NO: 7235 - protein, 9 aa, Homo sapiens
SLPVQHAVL

SEQ ID NO: 7236 - protein, 9 aa, Homo sapiens
YSAHNSTEF

SEQ ID NO: 7237 - protein, 9 aa, Homo sapiens
LFPNVYSTL

SEQ ID NO: 7238 - protein, 8 aa, Homo sapiens
SLPVQHAV

SEQ ID NO: 7239 - protein, 9 aa, Homo sapiens
YSAHNSTEF

SEQ ID NO: 7240 - protein, 9 aa, Homo sapiens
HASSLPLPL

SEQ ID NO: 7241 - protein, 9 aa, Homo sapiens
LSVGLPSSL

SEQ ID NO: 7242 - protein, 9 aa, Homo sapiens
YSTLVLCSL

SEQ ID NO: 7243 - protein, 10 aa, Homo sapiens
GAIDWAHLEL

SEQ ID NO: 7244 - protein, 9 aa, Homo sapiens
AAYVTPVLL

SEQ ID NO: 7245 - protein, 8 aa, Homo sapiens
AAYVTPVL

SEQ ID NO: 7246 - protein, 9 aa, Homo sapiens
AIDWAHLEL

SEQ ID NO: 7247 - protein, 9 aa, Homo sapiens
LFDFAADFI

SEQ ID NO: 7248 - protein, 9 aa, Homo sapiens
LFPNVYSTL

SEQ ID NO: 7249 - protein, 9 aa, Homo sapiens
FLSPILGFL

SEQ ID NO: 7250 - protein, 9 aa, Homo sapiens
AIDWAHLEL

SEQ ID NO: 7251 - protein, 8 aa, Homo sapiens
LFDFAADF

SEQ ID NO: 7252 - protein, 9 aa, Homo sapiens
YRYLCISHL

SEQ ID NO: 7253 - protein, 9 aa, Homo sapiens
RRRPYILTL

SEQ ID NO: 7254 - protein, 10 aa, Homo sapiens
YRYLCISHLI

SEQ ID NO: 7255 - protein, 9 aa, Homo sapiens
RRAMTLKSL

SEQ ID NO: 7256 - protein, 8 aa, Homo sapiens
RRPYILTL

SEQ ID NO: 7257 - protein, 9 aa, Homo sapiens
TDFMGQIVY

SEQ ID NO: 7258 - protein, 9 aa, Homo sapiens
RRRPYILTL

SEQ ID NO: 7259 - protein, 9 aa, Homo sapiens
YRYLCISHL

SEQ ID NO: 7260 - protein, 9 aa, Homo sapiens
NMPPHYRYL

SEQ ID NO: 7261 - protein, 9 aa, Homo sapiens
RRAMTLKSL

SEQ ID NO: 7262 - protein, 9 aa, Homo sapiens
LYFTGYLLF

SEQ ID NO: 7263 - protein, 9 aa, Homo sapiens
KRPTSRLIM

SEQ ID NO: 7264 - protein, 8 aa, Homo sapiens
RRPYILTL

SEQ ID NO: 7265 - protein, 11 aa, Homo sapiens
MSGAQDNSCLY

SEQ ID NO: 7266 - protein, 12 aa, Homo sapiens
GMSGAQDNSCLY

SEQ ID NO: 7267 - protein, 9 aa, Homo sapiens
GAQDNSCLY

SEQ ID NO: 7268 - protein, 8 aa, Homo sapiens
AQDNSCLY

SEQ ID NO: 7269 - protein, 9 aa, Homo sapiens
DSEDKQEKC

SEQ ID NO: 7270 - protein, 8 aa, Homo sapiens
PTDSEDKQ

SEQ ID NO: 7271 - protein, 9 aa, Homo sapiens
GLKGPVWPA

SEQ ID NO: 7272 - protein, 9 aa, Homo sapiens
CLYQEIAPS

SEQ ID NO: 7273 - protein, 10 aa, Homo sapiens
GGLKGPVWPA

SEQ ID NO: 7274 - protein, 9 aa, Homo sapiens
RVPSASPLI

SEQ ID NO: 7275 - protein, 10 aa, Homo sapiens
SCLYQEIAPS

SEQ ID NO: 7276 - protein, 9 aa, Homo sapiens
VLFHPYCWS

SEQ ID NO: 7277 - protein, 10 aa, Homo sapiens
CLYQEIAPSF

SEQ ID NO: 7278 - protein, 10 aa, Homo sapiens
CPVSPILLVL

SEQ ID NO: 7279 - protein, 10 aa, Homo sapiens
GLKGPVWPAK

SEQ ID NO: 7280 - protein, 9 aa, Homo sapiens
PVSPILLVL

SEQ ID NO: 7281 - protein, 9 aa, Homo sapiens
EIAPSFQRL

SEQ ID NO: 7282 - protein, 9 aa, Homo sapiens
SASPLIQKI

SEQ ID NO: 7283 - protein, 10 aa, Homo sapiens
GVACKGREQL

SEQ ID NO: 7284 - protein, 9 aa, Homo sapiens
CPVSPILLV

SEQ ID NO: 7285 - protein, 8 aa, Homo sapiens
ILLVLIFQ

SEQ ID NO: 7286 - protein, 10 aa, Homo sapiens
GLKGPVWPAK

SEQ ID NO: 7287 - protein, 12 aa, Homo sapiens
AMTCPCGWRPFK

SEQ ID NO: 7288 - protein, 11 aa, Homo sapiens
RVPSASPLIQK

SEQ ID NO: 7289 - protein, 9 aa, Homo sapiens
PSASPLIQK

SEQ ID NO: 7290 - protein, 10 aa, Homo sapiens
VPSASPLIQK

SEQ ID NO: 7291 - protein, 11 aa, Homo sapiens
RVPSASPLIQK

SEQ ID NO: 7292 - protein, 11 aa, Homo sapiens
MTCPCGWRPFK

SEQ ID NO: 7293 - protein, 9 aa, Homo sapiens
PSASPLIQK

SEQ ID NO: 7294 - protein, 8 aa, Homo sapiens
SASPLIQK

SEQ ID NO: 7295 - protein, 9 aa, Homo sapiens
LYQEIAPSF

SEQ ID NO: 7296 - protein, 10 aa, Homo sapiens
CLYQEIAPSF

SEQ ID NO: 7297 - protein, 11 aa, Homo sapiens
SCLYQEIAPSF

SEQ ID NO: 7298 - protein, 9 aa, Homo sapiens
KINRRSVLF

SEQ ID NO: 7299 - protein, 9 aa, Homo sapiens
KCPVSPILL

SEQ ID NO: 7300 - protein, 10 aa, Homo sapiens
RVQRRRVPSA

SEQ ID NO: 7301 - protein, 9 aa, Homo sapiens
RVQRRRVPS

SEQ ID NO: 7302 - protein, 10 aa, Homo sapiens
RTSSRHFSEA

SEQ ID NO: 7303 - protein, 9 aa, Homo sapiens
PSASPLIQK

SEQ ID NO: 7304 - protein, 9 aa, Homo sapiens
SRKDPKGSK

SEQ ID NO: 7305 - protein, 10 aa, Homo sapiens
GLKGPVWPAK

SEQ ID NO: 7306 - protein, 9 aa, Homo sapiens
SFQRLPCPR

SEQ ID NO: 7307 - protein, 10 aa, Homo sapiens
EAMTCPCGWR

SEQ ID NO: 7308 - protein, 9 aa, Homo sapiens
EAFQGWPRR

SEQ ID NO: 7309 - protein, 8 aa, Homo sapiens
EIAPSFQR

SEQ ID NO: 7310 - protein, 9 aa, Homo sapiens
EENSCSHGR

SEQ ID NO: 7311 - protein, 10 aa, Homo sapiens
WPRRPQGPGV

SEQ ID NO: 7312 - protein, 10 aa, Homo sapiens
RPFKGGPGGL

SEQ ID NO: 7313 - protein, 9 aa, Homo sapiens
RPQGPGVAC

SEQ ID NO: 7314 - protein, 9 aa, Homo sapiens
CPRTSSRHF

SEQ ID NO: 7315 - protein, 9 aa, Homo sapiens
SPILLVLIF

SEQ ID NO: 7316 - protein, 9 aa, Homo sapiens
VQRRRVPSA

SEQ ID NO: 7317 - protein, 10 aa, Homo sapiens
IQKINRRSVL

SEQ ID NO: 7318 - protein, 11 aa, Homo sapiens
LIQKINRRSVL

SEQ ID NO: 7319 - protein, 8 aa, Homo sapiens
SPILLVLI

SEQ ID NO: 7320 - protein, 8 aa, Homo sapiens
VSPILLVL

SEQ ID NO: 7321 - protein, 8 aa, Homo sapiens
CPVSPILL

SEQ ID NO: 7322 - protein, 9 aa, Homo sapiens
CPVSPILLV

SEQ ID NO: 7323 - protein, 10 aa, Homo sapiens
QEIAPSFQRL

SEQ ID NO: 7324 - protein, 10 aa, Homo sapiens
KQEKCPVSPI

SEQ ID NO: 7325 - protein, 9 aa, Homo sapiens
SASPLIQKI

SEQ ID NO: 7326 - protein, 9 aa, Homo sapiens
CSHGRIQRV

SEQ ID NO: 7327 - protein, 8 aa, Homo sapiens
ASPLIQKI

SEQ ID NO: 7328 - protein, 9 aa, Homo sapiens
GAQDNSCLY

SEQ ID NO: 7329 - protein, 9 aa, Homo sapiens
SSRHFSEAM

SEQ ID NO: 7330 - protein, 10 aa, Homo sapiens
MTCPCGWRPF

SEQ ID NO: 7331 - protein, 10 aa, Homo sapiens
PAKEENSCSH

SEQ ID NO: 7332 - protein, 9 aa, Homo sapiens
SRKDPKGSK

SEQ ID NO: 7333 - protein, 9 aa, Homo sapiens
RVPSASPLI

SEQ ID NO: 7334 - protein, 9 aa, Homo sapiens
SSRHFSEAM

SEQ ID NO: 7335 - protein, 9 aa, Homo sapiens
KINRRSVLF

SEQ ID NO: 7336 - protein, 8 aa, Homo sapiens
IAPSFQRL

SEQ ID NO: 7337 - protein, 8 aa, Homo sapiens
RVPSASPL

SEQ ID NO: 7338 - protein, 8 aa, Homo sapiens
VSPILLVL

SEQ ID NO: 7339 - protein, 9 aa, Homo sapiens
SSRHFSEAM

SEQ ID NO: 7340 - protein, 9 aa, Homo sapiens
SASPLIQKI

SEQ ID NO: 7341 - protein, 9 aa, Homo sapiens
RVPSASPLI

SEQ ID NO: 7342 - protein, 8 aa, Homo sapiens
VSPILLVL

SEQ ID NO: 7343 - protein, 8 aa, Homo sapiens
IAPSFQRL

SEQ ID NO: 7344 - protein, 9 aa, Homo sapiens
PVSPILLVL

SEQ ID NO: 7345 - protein, 9 aa, Homo sapiens
LYQEIAPSF

SEQ ID NO: 7346 - protein, 9 aa, Homo sapiens
RVPSASPLI

SEQ ID NO: 7347 - protein, 9 aa, Homo sapiens
KINRRSVLF

SEQ ID NO: 7348 - protein, 9 aa, Homo sapiens
KCPVSPILL

SEQ ID NO: 7349 - protein, 9 aa, Homo sapiens
VSPILLVLI

SEQ ID NO: 7350 - protein, 9 aa, Homo sapiens
RRVPSASPL

SEQ ID NO: 7351 - protein, 10 aa, Homo sapiens
RRVPSASPLI

SEQ ID NO: 7352 - protein, 9 aa, Homo sapiens
CSHGRIQRV

SEQ ID NO: 7353 - protein, 9 aa, Homo sapiens
RRSVLFHPY

SEQ ID NO: 7354 - protein, 9 aa, Homo sapiens
RRPQGPGVA

SEQ ID NO: 7355 - protein, 9 aa, Homo sapiens
LYQEIAPSF

SEQ ID NO: 7356 - protein, 9 aa, Homo sapiens
RRVPSASPL

SEQ ID NO: 7357 - protein, 9 aa, Homo sapiens
RRSVLFHPY

SEQ ID NO: 7358 - protein, 10 aa, Homo sapiens
NRRSVLFHPY

SEQ ID NO: 7359 - protein, 9 aa, Homo sapiens
YSEKISYVY

SEQ ID NO: 7360 - protein, 10 aa, Homo sapiens
KYSEKISYVY

SEQ ID NO: 7361 - protein, 9 aa, Homo sapiens
ATDFQGNDF

SEQ ID NO: 7362 - protein, 10 aa, Homo sapiens
ATDFQGNDFD

SEQ ID NO: 7363 - protein, 9 aa, Homo sapiens
AMTKLGFKV

SEQ ID NO: 7364 - protein, 9 aa, Homo sapiens
RLHRIIPKI

SEQ ID NO: 7365 - protein, 9 aa, Homo sapiens
MTFGRLHRI

SEQ ID NO: 7366 - protein, 11 aa, Homo sapiens
KMKYSEKISYV

SEQ ID NO: 7367 - protein, 10 aa, Homo sapiens
KAMTKLGFKV

SEQ ID NO: 7368 - protein, 10 aa, Homo sapiens
QMTFGRLHRI

SEQ ID NO: 7369 - protein, 11 aa, Homo sapiens
YKAMTKLGFKV

SEQ ID NO: 7370 - protein, 9 aa, Homo sapiens
KQLVIYEEI

SEQ ID NO: 7371 - protein, 12 aa, Homo sapiens
KKMKYSEKISYV

SEQ ID NO: 7372 - protein, 9 aa, Homo sapiens
RLRERKQLV

SEQ ID NO: 7373 - protein, 9 aa, Homo sapiens
KYSEKISYV

SEQ ID NO: 7374 - protein, 8 aa, Homo sapiens
KLGFKVTL

SEQ ID NO: 7375 - protein, 9 aa, Homo sapiens
TKLGFKVTL

SEQ ID NO: 7376 - protein, 10 aa, Homo sapiens
RLRERKQLVI

SEQ ID NO: 7377 - protein, 9 aa, Homo sapiens
KLGFKVTLP

SEQ ID NO: 7378 - protein, 9 aa, Homo sapiens
KAFDDIATY

SEQ ID NO: 7379 - protein, 9 aa, Homo sapiens
RIIPKIMPK

SEQ ID NO: 7380 - protein, 9 aa, Homo sapiens
YVYMKRNYK

SEQ ID NO: 7381 - protein, 10 aa, Homo sapiens
RIIPKIMPKK

SEQ ID NO: 7382 - protein, 10 aa, Homo sapiens
VTLPPFMCNK

SEQ ID NO: 7383 - protein, 9 aa, Homo sapiens
RIIPKIMPK

SEQ ID NO: 7384 - protein, 12 aa, Homo sapiens
MTFGRLHRIIPK

SEQ ID NO: 7385 - protein, 10 aa, Homo sapiens
VTLPPFMCNK

SEQ ID NO: 7386 - protein, 11 aa, Homo sapiens
ATYFSKKEWKK

SEQ ID NO: 7387 - protein, 9 aa, Homo sapiens
KYSEKISYV

SEQ ID NO: 7388 - protein, 10 aa, Homo sapiens
VYMKRNYKAM

SEQ ID NO: 7389 - protein, 10 aa, Homo sapiens
NYKAMTKLGF

SEQ ID NO: 7390 - protein, 9 aa, Homo sapiens
AFDDIATYF

SEQ ID NO: 7391 - protein, 9 aa, Homo sapiens
KAMTKLGFK

SEQ ID NO: 7392 - protein, 9 aa, Homo sapiens
RIIPKIMPK

SEQ ID NO: 7393 - protein, 9 aa, Homo sapiens
YVYMKRNYK

SEQ ID NO: 7394 - protein, 10 aa, Homo sapiens
RIIPKIMPKK

SEQ ID NO: 7395 - protein, 9 aa, Homo sapiens
KYSEKISYV

SEQ ID NO: 7396 - protein, 8 aa, Homo sapiens
MTFGRLHR

SEQ ID NO: 7397 - protein, 9 aa, Homo sapiens
YVYMKRNYK

SEQ ID NO: 7398 - protein, 10 aa, Homo sapiens
HAWTHRLRER

SEQ ID NO: 7399 - protein, 9 aa, Homo sapiens
NISEKINKR

SEQ ID NO: 7400 - protein, 9 aa, Homo sapiens
NDFDNDHNR

SEQ ID NO: 7401 - protein, 9 aa, Homo sapiens
HPQMTFGRL

SEQ ID NO: 7402 - protein, 9 aa, Homo sapiens
RPRDDAKAS

SEQ ID NO: 7403 - protein, 9 aa, Homo sapiens
GPQNDGKQL

SEQ ID NO: 7404 - protein, 10 aa, Homo sapiens
EHPQMTFGRL

SEQ ID NO: 7405 - protein, 9 aa, Homo sapiens
YMKRNYKAM

SEQ ID NO: 7406 - protein, 10 aa, Homo sapiens
VYMKRNYKAM

SEQ ID NO: 7407 - protein, 12 aa, Homo sapiens
YMKRNYKAMTKL

SEQ ID NO: 7408 - protein, 8 aa, Homo sapiens
KLGFKVTL

SEQ ID NO: 7409 - protein, 9 aa, Homo sapiens
EWKKMKYSE

SEQ ID NO: 7410 - protein, 9 aa, Homo sapiens
RLRERKQLV

SEQ ID NO: 7411 - protein, 9 aa, Homo sapiens
KQLVIYEEI

SEQ ID NO: 7412 - protein, 9 aa, Homo sapiens
MTFGRLHRI

SEQ ID NO: 7413 - protein, 10 aa, Homo sapiens
KAMTKLGFKV

SEQ ID NO: 7414 - protein, 9 aa, Homo sapiens
RLHRIIPKI

SEQ ID NO: 7415 - protein, 9 aa, Homo sapiens
RLRERKQLV

SEQ ID NO: 7416 - protein, 9 aa, Homo sapiens
KAFDDIATY

SEQ ID NO: 7417 - protein, 9 aa, Homo sapiens
YMKRNYKAM

SEQ ID NO: 7418 - protein, 9 aa, Homo sapiens
YSEKISYVY

SEQ ID NO: 7419 - protein, 10 aa, Homo sapiens
ISYVYMKRNY

SEQ ID NO: 7420 - protein, 9 aa, Homo sapiens
YMKRNYKAM

SEQ ID NO: 7421 - protein, 9 aa, Homo sapiens
MTFGRLHRI

SEQ ID NO: 7422 - protein, 9 aa, Homo sapiens
AFDDIATYF

SEQ ID NO: 7423 - protein, 10 aa, Homo sapiens
SGPQNDGKQL

SEQ ID NO: 7424 - protein, 8 aa, Homo sapiens
TLPPFMCN

SEQ ID NO: 7425 - protein, 10 aa, Homo sapiens
SGPKRGKHAW

SEQ ID NO: 7426 - protein, 9 aa, Homo sapiens
MTFGRLHRI

SEQ ID NO: 7427 - protein, 9 aa, Homo sapiens
KAFDDIATY

SEQ ID NO: 7428 - protein, 9 aa, Homo sapiens
YMKRNYKAM

SEQ ID NO: 7429 - protein, 9 aa, Homo sapiens
VTLPPFMCN

SEQ ID NO: 7430 - protein, 9 aa, Homo sapiens
FKVTLPPFM

SEQ ID NO: 7431 - protein, 9 aa, Homo sapiens
AFDDIATYF

SEQ ID NO: 7432 - protein, 10 aa, Homo sapiens
KAFDDIATYF

SEQ ID NO: 7433 - protein, 12 aa, Homo sapiens
RSKAFDDIATYF

SEQ ID NO: 7434 - protein, 8 aa, Homo sapiens
AFDDIATY

SEQ ID NO: 7435 - protein, 8 aa, Homo sapiens
FDDIATYF

SEQ ID NO: 7436 - protein, 9 aa, Homo sapiens
MTFGRLHRI

SEQ ID NO: 7437 - protein, 9 aa, Homo sapiens
LRERKQLVI

SEQ ID NO: 7438 - protein, 10 aa, Homo sapiens
KRNYKAMTKL

SEQ ID NO: 7439 - protein, 9 aa, Homo sapiens
FKVTLPPFM

SEQ ID NO: 7440 - protein, 9 aa, Homo sapiens
KAFDDIATY

SEQ ID NO: 7441 - protein, 9 aa, Homo sapiens
KRGKHAWTH

SEQ ID NO: 7442 - protein, 9 aa, Homo sapiens
SYVYMKRNY

SEQ ID NO: 7443 - protein, 9 aa, Homo sapiens
MTFGRLHRI

SEQ ID NO: 7444 - protein, 9 aa, Homo sapiens
KYSEKISYV

SEQ ID NO: 7445 - protein, 9 aa, Homo sapiens
YMKRNYKAM

SEQ ID NO: 7446 - protein, 10 aa, Homo sapiens
KYSEKISYVY

SEQ ID NO: 7447 - protein, 8 aa, Homo sapiens
KYSEKISY

SEQ ID NO: 7448 - protein, 9 aa, Homo sapiens
KRGKHAWTH

SEQ ID NO: 7449 - protein, 8 aa, Homo sapiens
YSDQELAY

SEQ ID NO: 7450 - protein, 10 aa, Homo sapiens
VVDQPMERLY

SEQ ID NO: 7451 - protein, 9 aa, Homo sapiens
YSDQELAYL

SEQ ID NO: 7452 - protein, 9 aa, Homo sapiens
AMGEWNPNV

SEQ ID NO: 7453 - protein, 10 aa, Homo sapiens
KVMSKVVPDV

SEQ ID NO: 7454 - protein, 9 aa, Homo sapiens
VMSKVVPDV

SEQ ID NO: 7455 - protein, 10 aa, Homo sapiens
RLYEELVERM

SEQ ID NO: 7456 - protein, 8 aa, Homo sapiens
MLLATFKL

SEQ ID NO: 7457 - protein, 9 aa, Homo sapiens
AVMAISQEL

SEQ ID NO: 7458 - protein, 10 aa, Homo sapiens
KLTWLLSIDL

SEQ ID NO: 7459 - protein, 10 aa, Homo sapiens
WLPKSIINQV

SEQ ID NO: 7460 - protein, 12 aa, Homo sapiens
RLYEELVERMEA

SEQ ID NO: 7461 - protein, 10 aa, Homo sapiens
MLLATFKLCA

SEQ ID NO: 7462 - protein, 9 aa, Homo sapiens
RLYEELVER

SEQ ID NO: 7463 - protein, 9 aa, Homo sapiens
TLYSDQELA

SEQ ID NO: 7464 - protein, 11 aa, Homo sapiens
TLYSDQELAYL

SEQ ID NO: 7465 - protein, 9 aa, Homo sapiens
ALGGPTPST

SEQ ID NO: 7466 - protein, 9 aa, Homo sapiens
YLQQGEEAM

SEQ ID NO: 7467 - protein, 8 aa, Homo sapiens
TLYSDQEL

SEQ ID NO: 7468 - protein, 10 aa, Homo sapiens
SSYRHMRNMK

SEQ ID NO: 7469 - protein, 10 aa, Homo sapiens
SAWSPTLPLK

SEQ ID NO: 7470 - protein, 12 aa, Homo sapiens
KVMSKVVPDVGK

SEQ ID NO: 7471 - protein, 9 aa, Homo sapiens
RLYEELVER

SEQ ID NO: 7472 - protein, 9 aa, Homo sapiens
AWSPTLPLK

SEQ ID NO: 7473 - protein, 10 aa, Homo sapiens
SAWSPTLPLK

SEQ ID NO: 7474 - protein, 10 aa, Homo sapiens
SSYRHMRNMK

SEQ ID NO: 7475 - protein, 10 aa, Homo sapiens
SIDLKGWLPK

SEQ ID NO: 7476 - protein, 11 aa, Homo sapiens
AVMAISQELNR

SEQ ID NO: 7477 - protein, 9 aa, Homo sapiens
STWINQVRR

SEQ ID NO: 7478 - protein, 10 aa, Homo sapiens
LYSDQELAYL

SEQ ID NO: 7479 - protein, 12 aa, Homo sapiens
RWILPTTCASAW

SEQ ID NO: 7480 - protein, 11 aa, Homo sapiens
TWLLSIDLKGW

SEQ ID NO: 7481 - protein, 9 aa, Homo sapiens
VVPDVGKVF

SEQ ID NO: 7482 - protein, 9 aa, Homo sapiens
VLSQTQVDF

SEQ ID NO: 7483 - protein, 9 aa, Homo sapiens
KTKLTWLLS

SEQ ID NO: 7484 - protein, 10 aa, Homo sapiens
KTKLTWLLSI

SEQ ID NO: 7485 - protein, 10 aa, Homo sapiens
SSYRHMRNMK

SEQ ID NO: 7486 - protein, 10 aa, Homo sapiens
NVKEIKVLQK

SEQ ID NO: 7487 - protein, 9 aa, Homo sapiens
SYRHMRNMK

SEQ ID NO: 7488 - protein, 9 aa, Homo sapiens
CAQLHWYTR

SEQ ID NO: 7489 - protein, 10 aa, Homo sapiens
DFVSVRCAKR

SEQ ID NO: 7490 - protein, 9 aa, Homo sapiens
FVSVRCAKR

SEQ ID NO: 7491 - protein, 9 aa, Homo sapiens
DFANHLRKR

SEQ ID NO: 7492 - protein, 9 aa, Homo sapiens
STWINQVRR

SEQ ID NO: 7493 - protein, 9 aa, Homo sapiens
RPRWILPTT

SEQ ID NO: 7494 - protein, 10 aa, Homo sapiens
RPRWILPTTC

SEQ ID NO: 7495 - protein, 10 aa, Homo sapiens
SPSKTKLTWL

SEQ ID NO: 7496 - protein, 10 aa, Homo sapiens
LPKSIINQVL

SEQ ID NO: 7497 - protein, 10 aa, Homo sapiens
QPAVPNCAQL

SEQ ID NO: 7498 - protein, 8 aa, Homo sapiens
CPRPRWIL

SEQ ID NO: 7499 - protein, 9 aa, Homo sapiens
NQVRRRSSL

SEQ ID NO: 7500 - protein, 9 aa, Homo sapiens
QVRRRSSLL

SEQ ID NO: 7501 - protein, 8 aa, Homo sapiens
QVRRRSSL

SEQ ID NO: 7502 - protein, 8 aa, Homo sapiens
NVKEIKVL

SEQ ID NO: 7503 - protein, 9 aa, Homo sapiens
HLRKRLESH

SEQ ID NO: 7504 - protein, 8 aa, Homo sapiens
TLYSDQEL

SEQ ID NO: 7505 - protein, 9 aa, Homo sapiens
KEIKVLQKI

SEQ ID NO: 7506 - protein, 9 aa, Homo sapiens
MERLYEELV

SEQ ID NO: 7507 - protein, 10 aa, Homo sapiens
GEWNPNVKEI

SEQ ID NO: 7508 - protein, 9 aa, Homo sapiens
SQQDNGDKV

SEQ ID NO: 7509 - protein, 9 aa, Homo sapiens
RLYEELVER

SEQ ID NO: 7510 - protein, 9 aa, Homo sapiens
SSYRHMRNM

SEQ ID NO: 7511 - protein, 9 aa, Homo sapiens
SAWSPTLPL

SEQ ID NO: 7512 - protein, 9 aa, Homo sapiens
YLQQGEEAM

SEQ ID NO: 7513 - protein, 9 aa, Homo sapiens
VVPDVGKVF

SEQ ID NO: 7514 - protein, 9 aa, Homo sapiens
HLRKRLESH

SEQ ID NO: 7515 - protein, 9 aa, Homo sapiens
SAWSPTLPL

SEQ ID NO: 7516 - protein, 9 aa, Homo sapiens
YSDQELAYL

SEQ ID NO: 7517 - protein, 9 aa, Homo sapiens
CASAWSPTL

SEQ ID NO: 7518 - protein, 10 aa, Homo sapiens
ILPTTCASAW

SEQ ID NO: 7519 - protein, 9 aa, Homo sapiens
VGPRDFVSV

SEQ ID NO: 7520 - protein, 9 aa, Homo sapiens
SAWSPTLPL

SEQ ID NO: 7521 - protein, 9 aa, Homo sapiens
LAAEAAGNL

SEQ ID NO: 7522 - protein, 9 aa, Homo sapiens
CASAWSPTL

SEQ ID NO: 7523 - protein, 9 aa, Homo sapiens
FANHLRKRL

SEQ ID NO: 7524 - protein, 9 aa, Homo sapiens
YSDQELAYL

SEQ ID NO: 7525 - protein, 9 aa, Homo sapiens
LYEELVERM

SEQ ID NO: 7526 - protein, 9 aa, Homo sapiens
SAWSPTLPL

SEQ ID NO: 7527 - protein, 8 aa, Homo sapiens
VFRLEVVV

SEQ ID NO: 7528 - protein, 9 aa, Homo sapiens
LRQQAVMAI

SEQ ID NO: 7529 - protein, 10 aa, Homo sapiens
YRHMRNMKGL

SEQ ID NO: 7530 - protein, 9 aa, Homo sapiens
SSYRHMRNM

SEQ ID NO: 7531 - protein, 8 aa, Homo sapiens
RRGSTCVL

SEQ ID NO: 7532 - protein, 9 aa, Homo sapiens
KRRGSTCVL

SEQ ID NO: 7533 - protein, 9 aa, Homo sapiens
RRGSTCVLA

SEQ ID NO: 7534 - protein, 9 aa, Homo sapiens
LRQQAVMAI

SEQ ID NO: 7535 - protein, 10 aa, Homo sapiens
YRHMRNMKGL

SEQ ID NO: 7536 - protein, 9 aa, Homo sapiens
KRRGSTCVL

SEQ ID NO: 7537 - protein, 10 aa, Homo sapiens
IRAEHGPTCM

SEQ ID NO: 7538 - protein, 9 aa, Homo sapiens
LYSDQELAY

SEQ ID NO: 7539 - protein, 9 aa, Homo sapiens
WSNAISALY

SEQ ID NO: 7540 - protein, 10 aa, Homo sapiens
DWSNAISALY

SEQ ID NO: 7541 - protein, 12 aa, Homo sapiens
HSDGTRTCAKLY

SEQ ID NO: 7542 - protein, 9 aa, Homo sapiens
LYDKSDPYY

SEQ ID NO: 7543 - protein, 9 aa, Homo sapiens
LLALALASV

SEQ ID NO: 7544 - protein, 10 aa, Homo sapiens
LLLALALASV

SEQ ID NO: 7545 - protein, 9 aa, Homo sapiens
ILGDWSNAI

SEQ ID NO: 7546 - protein, 11 aa, Homo sapiens
PLLLALALASV

SEQ ID NO: 7547 - protein, 10 aa, Homo sapiens
LLALALASVP

SEQ ID NO: 7548 - protein, 12 aa, Homo sapiens
RPLLLALALASV

SEQ ID NO: 7549 - protein, 10 aa, Homo sapiens
RPLLLALALA

SEQ ID NO: 7550 - protein, 10 aa, Homo sapiens
YLPSNWANTA

SEQ ID NO: 7551 - protein, 11 aa, Homo sapiens
LLLALALASVP

SEQ ID NO: 7552 - protein, 10 aa, Homo sapiens
ALALASVPCA

SEQ ID NO: 7553 - protein, 10 aa, Homo sapiens
KLYDKSDPYY

SEQ ID NO: 7554 - protein, 9 aa, Homo sapiens
PLRPLLLAL

SEQ ID NO: 7555 - protein, 8 aa, Homo sapiens
ALASVPCA

SEQ ID NO: 7556 - protein, 11 aa, Homo sapiens
SLESGADLPYL

SEQ ID NO: 7557 - protein, 9 aa, Homo sapiens
ALASVPCAQ

SEQ ID NO: 7558 - protein, 10 aa, Homo sapiens
KLYDKSDPYY

SEQ ID NO: 7559 - protein, 9 aa, Homo sapiens
KLYDKSDPY

SEQ ID NO: 7560 - protein, 9 aa, Homo sapiens
RTCAKLYDK

SEQ ID NO: 7561 - protein, 9 aa, Homo sapiens
LTVWSRQGK

SEQ ID NO: 7562 - protein, 9 aa, Homo sapiens
GTYPRLEEY

SEQ ID NO: 7563 - protein, 9 aa, Homo sapiens
RTCAKLYDK

SEQ ID NO: 7564 - protein, 9 aa, Homo sapiens
ASSLVVAPR

SEQ ID NO: 7565 - protein, 10 aa, Homo sapiens
GTYPRLEEYR

SEQ ID NO: 7566 - protein, 11 aa, Homo sapiens
GTYPRLEEYRR

SEQ ID NO: 7567 - protein, 10 aa, Homo sapiens
KFSAGTYPRL

SEQ ID NO: 7568 - protein, 9 aa, Homo sapiens
MSPLRPLLL

SEQ ID NO: 7569 - protein, 11 aa, Homo sapiens
YYENCCGGAEL

SEQ ID NO: 7570 - protein, 10 aa, Homo sapiens
EYRRGILGDW

SEQ ID NO: 7571 - protein, 11 aa, Homo sapiens
PYLPSNWANTA

SEQ ID NO: 7572 - protein, 9 aa, Homo sapiens
PYLPSNWAN

SEQ ID NO: 7573 - protein, 9 aa, Homo sapiens
NWANTASSL

SEQ ID NO: 7574 - protein, 9 aa, Homo sapiens
KTHKFSAGT

SEQ ID NO: 7575 - protein, 10 aa, Homo sapiens
KAGKTHKFSA

SEQ ID NO: 7576 - protein, 9 aa, Homo sapiens
WSRQGKAGK

SEQ ID NO: 7577 - protein, 9 aa, Homo sapiens
GTRTCAKLY

SEQ ID NO: 7578 - protein, 9 aa, Homo sapiens
RTCAKLYDK

SEQ ID NO: 7579 - protein, 9 aa, Homo sapiens
NAISALYCR

SEQ ID NO: 7580 - protein, 10 aa, Homo sapiens
TASSLVVAPR

SEQ ID NO: 7581 - protein, 9 aa, Homo sapiens
ASSLVVAPR

SEQ ID NO: 7582 - protein, 9 aa, Homo sapiens
TYPRLEEYR

SEQ ID NO: 7583 - protein, 9 aa, Homo sapiens
DLKHSDGTR

SEQ ID NO: 7584 - protein, 10 aa, Homo sapiens
SPLRPLLLAL

SEQ ID NO: 7585 - protein, 9 aa, Homo sapiens
RPLLLALAL

SEQ ID NO: 7586 - protein, 12 aa, Homo sapiens
YPRLEEYRRGIL

SEQ ID NO: 7587 - protein, 9 aa, Homo sapiens
APRCELTVW

SEQ ID NO: 7588 - protein, 12 aa, Homo sapiens
YPRLEEYRRGIL

SEQ ID NO: 7589 - protein, 10 aa, Homo sapiens
SPLRPLLLAL

SEQ ID NO: 7590 - protein, 11 aa, Homo sapiens
MSPLRPLLLAL

SEQ ID NO: 7591 - protein, 8 aa, Homo sapiens
WANTASSL

SEQ ID NO: 7592 - protein, 8 aa, Homo sapiens
SPLRPLLL

SEQ ID NO: 7593 - protein, 8 aa, Homo sapiens
VVAPRCEL

SEQ ID NO: 7594 - protein, 9 aa, Homo sapiens
GDWSNAISA

SEQ ID NO: 7595 - protein, 10 aa, Homo sapiens
GDWSNAISAL

SEQ ID NO: 7596 - protein, 10 aa, Homo sapiens
LESGADLPYL

SEQ ID NO: 7597 - protein, 9 aa, Homo sapiens
RLEEYRRGI

SEQ ID NO: 7598 - protein, 8 aa, Homo sapiens
RQGKAGKT

SEQ ID NO: 7599 - protein, 9 aa, Homo sapiens
RQGKAGKTH

SEQ ID NO: 7600 - protein, 9 aa, Homo sapiens
WSNAISALY

SEQ ID NO: 7601 - protein, 9 aa, Homo sapiens
GTYPRLEEY

SEQ ID NO: 7602 - protein, 9 aa, Homo sapiens
FSAGTYPRL

SEQ ID NO: 7603 - protein, 9 aa, Homo sapiens
KLYDKSDPY

SEQ ID NO: 7604 - protein, 9 aa, Homo sapiens
PLRPLLLAL

SEQ ID NO: 7605 - protein, 9 aa, Homo sapiens
MSPLRPLLL

SEQ ID NO: 7606 - protein, 9 aa, Homo sapiens
FSAGTYPRL

SEQ ID NO: 7607 - protein, 9 aa, Homo sapiens
LVVAPRCEL

SEQ ID NO: 7608 - protein, 9 aa, Homo sapiens
VAPRCELTV

SEQ ID NO: 7609 - protein, 8 aa, Homo sapiens
LRPLLLAL

SEQ ID NO: 7610 - protein, 9 aa, Homo sapiens
FSAGTYPRL

SEQ ID NO: 7611 - protein, 9 aa, Homo sapiens
WANTASSLV

SEQ ID NO: 7612 - protein, 9 aa, Homo sapiens
LSLESGADL

SEQ ID NO: 7613 - protein, 8 aa, Homo sapiens
WANTASSL

SEQ ID NO: 7614 - protein, 9 aa, Homo sapiens
LYDKSDPYY

SEQ ID NO: 7615 - protein, 11 aa, Homo sapiens
YYENCCGGAEL

SEQ ID NO: 7616 - protein, 9 aa, Homo sapiens
MSPLRPLLL

SEQ ID NO: 7617 - protein, 9 aa, Homo sapiens
NWANTASSL

SEQ ID NO: 7618 - protein, 9 aa, Homo sapiens
MSPLRPLLL

SEQ ID NO: 7619 - protein, 9 aa, Homo sapiens
WSNAISALY

SEQ ID NO: 7620 - protein, 9 aa, Homo sapiens
GTYPRLEEY

SEQ ID NO: 7621 - protein, 8 aa, Homo sapiens
YRRGILGD

SEQ ID NO: 7622 - protein, 9 aa, Homo sapiens
ASADLKHSD

SEQ ID NO: 7623 - protein, 9 aa, Homo sapiens
EYRRGILGD

SEQ ID NO: 7624 - protein, 9 aa, Homo sapiens
MSPLRPLLL

SEQ ID NO: 7625 - protein, 10 aa, Homo sapiens
LRPLLLALAL

SEQ ID NO: 7626 - protein, 9 aa, Homo sapiens
WSNAISALY

SEQ ID NO: 7627 - protein, 8 aa, Homo sapiens
LRPLLLAL

SEQ ID NO: 7628 - protein, 8 aa, Homo sapiens
TYPRLEEY

SEQ ID NO: 7629 - protein, 10 aa, Homo sapiens
CVDAEGMEVY

SEQ ID NO: 7630 - protein, 10 aa, Homo sapiens
FTATSFGHPY

SEQ ID NO: 7631 - protein, 9 aa, Homo sapiens
FSLFIQSLY

SEQ ID NO: 7632 - protein, 9 aa, Homo sapiens
RTSSKTAFY

SEQ ID NO: 7633 - protein, 10 aa, Homo sapiens
YSLEHSTDDY

SEQ ID NO: 7634 - protein, 10 aa, Homo sapiens
YSDFSTPLAH

SEQ ID NO: 7635 - protein, 9 aa, Homo sapiens
STFTETTLY

SEQ ID NO: 7636 - protein, 9 aa, Homo sapiens
ITESASLYF

SEQ ID NO: 7637 - protein, 9 aa, Homo sapiens
YSDFSTPLA

SEQ ID NO: 7638 - protein, 9 aa, Homo sapiens
WVSANIFEY

SEQ ID NO: 7639 - protein, 10 aa, Homo sapiens
QVDQFLGVPY

SEQ ID NO: 7640 - protein, 11 aa, Homo sapiens
TTEPEISCDFY

SEQ ID NO: 7641 - protein, 10 aa, Homo sapiens
FTDLIQSGSF

SEQ ID NO: 7642 - protein, 12 aa, Homo sapiens
STSPGVSEDCLY

SEQ ID NO: 7643 - protein, 12 aa, Homo sapiens
STTEPEISCDFY

SEQ ID NO: 7644 - protein, 10 aa, Homo sapiens
LAAQSTLSFY

SEQ ID NO: 7645 - protein, 10 aa, Homo sapiens
RVEAAATWYY

SEQ ID NO: 7646 - protein, 8 aa, Homo sapiens
ITESASLY

SEQ ID NO: 7647 - protein, 10 aa, Homo sapiens
ILEDKVKNFY

SEQ ID NO: 7648 - protein, 9 aa, Homo sapiens
SLEHSTDDY

SEQ ID NO: 7649 - protein, 11 aa, Homo sapiens
LAEITESASLY

SEQ ID NO: 7650 - protein, 9 aa, Homo sapiens
FTDLIQSGS

SEQ ID NO: 7651 - protein, 9 aa, Homo sapiens
LLADVQFAL

SEQ ID NO: 7652 - protein, 9 aa, Homo sapiens
WLFKHLFSA

SEQ ID NO: 7653 - protein, 9 aa, Homo sapiens
FLLFLQHAI

SEQ ID NO: 7654 - protein, 9 aa, Homo sapiens
NLFGGKFLV

SEQ ID NO: 7655 - protein, 9 aa, Homo sapiens
SLLELPEFL

SEQ ID NO: 7656 - protein, 9 aa, Homo sapiens
TLLASICWV

SEQ ID NO: 7657 - protein, 9 aa, Homo sapiens
SLACVPCPV

SEQ ID NO: 7658 - protein, 9 aa, Homo sapiens
YLLCPFPPM

SEQ ID NO: 7659 - protein, 10 aa, Homo sapiens
FTLLASICWV

SEQ ID NO: 7660 - protein, 9 aa, Homo sapiens
SLTEKVFKV

SEQ ID NO: 7661 - protein, 9 aa, Homo sapiens
IMQYFSHFI

SEQ ID NO: 7662 - protein, 10 aa, Homo sapiens
SLLELPEFLL

SEQ ID NO: 7663 - protein, 9 aa, Homo sapiens
GLLDQVAAL

SEQ ID NO: 7664 - protein, 9 aa, Homo sapiens
SLLSYEASV

SEQ ID NO: 7665 - protein, 9 aa, Homo sapiens
LLDEIYDTI

SEQ ID NO: 7666 - protein, 9 aa, Homo sapiens
VIFDANAPV

SEQ ID NO: 7667 - protein, 10 aa, Homo sapiens
YLNVFIPQNV

SEQ ID NO: 7668 - protein, 9 aa, Homo sapiens
FLAAVGNLI

SEQ ID NO: 7669 - protein, 9 aa, Homo sapiens
LMMQKFEKV

SEQ ID NO: 7670 - protein, 10 aa, Homo sapiens
NMLSGLYNPI

SEQ ID NO: 7671 - protein, 9 aa, Homo sapiens
LLQTFQVFI

SEQ ID NO: 7672 - protein, 9 aa, Homo sapiens
MLSGLYNPI

SEQ ID NO: 7673 - protein, 10 aa, Homo sapiens
LLLDEIYDTI

SEQ ID NO: 7674 - protein, 10 aa, Homo sapiens
ELLADVQFAL

SEQ ID NO: 7675 - protein, 10 aa, Homo sapiens
FLVNVGQFNL

SEQ ID NO: 7676 - protein, 10 aa, Homo sapiens
YLLCPFPPMA

SEQ ID NO: 7677 - protein, 12 aa, Homo sapiens
FLASLLELPEFL

SEQ ID NO: 7678 - protein, 9 aa, Homo sapiens
FLSSGSGEV

SEQ ID NO: 7679 - protein, 10 aa, Homo sapiens
GLTTELFSPV

SEQ ID NO: 7680 - protein, 9 aa, Homo sapiens
KQVDQFLGV

SEQ ID NO: 7681 - protein, 10 aa, Homo sapiens
SLWVEVDLLI

SEQ ID NO: 7682 - protein, 10 aa, Homo sapiens
WGLLDQVAAL

SEQ ID NO: 7683 - protein, 9 aa, Homo sapiens
MLPGLTTEL

SEQ ID NO: 7684 - protein, 10 aa, Homo sapiens
ALVLEIFTLL

SEQ ID NO: 7685 - protein, 10 aa, Homo sapiens
QNLFGGKFLV

SEQ ID NO: 7686 - protein, 12 aa, Homo sapiens
SLLSYEASVPSV

SEQ ID NO: 7687 - protein, 10 aa, Homo sapiens
FLAAVGNLIV

SEQ ID NO: 7688 - protein, 10 aa, Homo sapiens
SLFIQSLYEA

SEQ ID NO: 7689 - protein, 10 aa, Homo sapiens
HWLFKHLFSA

SEQ ID NO: 7690 - protein, 10 aa, Homo sapiens
ASLLELPEFL

SEQ ID NO: 7691 - protein, 9 aa, Homo sapiens
HLMQKFEKV

SEQ ID NO: 7692 - protein, 8 aa, Homo sapiens
FLASLLEL

SEQ ID NO: 7693 - protein, 10 aa, Homo sapiens
KIMQYFSHFI

SEQ ID NO: 7694 - protein, 10 aa, Homo sapiens
LLADVQFALG

SEQ ID NO: 7695 - protein, 10 aa, Homo sapiens
MLSGLYNPIV

SEQ ID NO: 7696 - protein, 9 aa, Homo sapiens
ALVLEIFTL

SEQ ID NO: 7697 - protein, 10 aa, Homo sapiens
GLYNPIVFSA

SEQ ID NO: 7698 - protein, 9 aa, Homo sapiens
GLREDLLSL

SEQ ID NO: 7699 - protein, 9 aa, Homo sapiens
SLQDVPLAA

SEQ ID NO: 7700 - protein, 10 aa, Homo sapiens
SLQDVPLAAL

SEQ ID NO: 7701 - protein, 9 aa, Homo sapiens
VLNDAQTKL

SEQ ID NO: 7702 - protein, 9 aa, Homo sapiens
FLVAKGIRL

SEQ ID NO: 7703 - protein, 10 aa, Homo sapiens
SLYEAGQQDV

SEQ ID NO: 7704 - protein, 9 aa, Homo sapiens
DLGDVMETV

SEQ ID NO: 7705 - protein, 9 aa, Homo sapiens
FLREPPARA

SEQ ID NO: 7706 - protein, 11 aa, Homo sapiens
VIFDANAPVAV

SEQ ID NO: 7707 - protein, 9 aa, Homo sapiens
GLLSSPSVL

SEQ ID NO: 7708 - protein, 9 aa, Homo sapiens
SLEEKSLSL

SEQ ID NO: 7709 - protein, 11 aa, Homo sapiens
FLAAVGNLIVV

SEQ ID NO: 7710 - protein, 9 aa, Homo sapiens
ELAETGLEL

SEQ ID NO: 7711 - protein, 10 aa, Homo sapiens
GLLSSPSVLL

SEQ ID NO: 7712 - protein, 9 aa, Homo sapiens
VLPSLTEKV

SEQ ID NO: 7713 - protein, 9 aa, Homo sapiens
SLALSSVVV

SEQ ID NO: 7714 - protein, 9 aa, Homo sapiens
SLWVEVDLL

SEQ ID NO: 7715 - protein, 9 aa, Homo sapiens
ELPEFLLFL

SEQ ID NO: 7716 - protein, 9 aa, Homo sapiens
QLAEITESA

SEQ ID NO: 7717 - protein, 8 aa, Homo sapiens
GLLSSPSV

SEQ ID NO: 7718 - protein, 10 aa, Homo sapiens
RLEDIPVASL

SEQ ID NO: 7719 - protein, 10 aa, Homo sapiens
ELAETGLELL

SEQ ID NO: 7720 - protein, 9 aa, Homo sapiens
GLINRAKAV

SEQ ID NO: 7721 - protein, 9 aa, Homo sapiens
ALLSNSSML

SEQ ID NO: 7722 - protein, 8 aa, Homo sapiens
GLLDQVAA

SEQ ID NO: 7723 - protein, 8 aa, Homo sapiens
TLYPEAQV

SEQ ID NO: 7724 - protein, 10 aa, Homo sapiens
KLMGISIRNK

SEQ ID NO: 7725 - protein, 9 aa, Homo sapiens
RLYFGTSGY

SEQ ID NO: 7726 - protein, 10 aa, Homo sapiens
HTYPFGWYQK

SEQ ID NO: 7727 - protein, 9 aa, Homo sapiens
RLILPQMPK

SEQ ID NO: 7728 - protein, 10 aa, Homo sapiens
RTSGLLSSWK

SEQ ID NO: 7729 - protein, 9 aa, Homo sapiens
CLSFCQLQK

SEQ ID NO: 7730 - protein, 9 aa, Homo sapiens
SLYFTCTLY

SEQ ID NO: 7731 - protein, 10 aa, Homo sapiens
CRLILPQMPK

SEQ ID NO: 7732 - protein, 9 aa, Homo sapiens
RLLHGVGDK

SEQ ID NO: 7733 - protein, 10 aa, Homo sapiens
ACLSFCQLQK

SEQ ID NO: 7734 - protein, 10 aa, Homo sapiens
SRLYFGTSGY

SEQ ID NO: 7735 - protein, 9 aa, Homo sapiens
RLGVNVTWK

SEQ ID NO: 7736 - protein, 10 aa, Homo sapiens
IIDMASAWAK

SEQ ID NO: 7737 - protein, 11 aa, Homo sapiens
SLSSQKHWLFK

SEQ ID NO: 7738 - protein, 10 aa, Homo sapiens
RLQQNLFGGK

SEQ ID NO: 7739 - protein, 9 aa, Homo sapiens
AIQVGTSWK

SEQ ID NO: 7740 - protein, 9 aa, Homo sapiens
VVLPSLTEK

SEQ ID NO: 7741 - protein, 10 aa, Homo sapiens
SVFPPGPLIC

SEQ ID NO: 7742 - protein, 11 aa, Homo sapiens
SVFPPGPLICS

SEQ ID NO: 7743 - protein, 10 aa, Homo sapiens
AIFPSRGLAR

SEQ ID NO: 7744 - protein, 9 aa, Homo sapiens
ATSCPPTIK

SEQ ID NO: 7745 - protein, 9 aa, Homo sapiens
GLYNPIVFS

SEQ ID NO: 7746 - protein, 9 aa, Homo sapiens
KLLVKIMSY

SEQ ID NO: 7747 - protein, 9 aa, Homo sapiens
ILLEPYLFW

SEQ ID NO: 7748 - protein, 10 aa, Homo sapiens
HTYPFGWYQK

SEQ ID NO: 7749 - protein, 10 aa, Homo sapiens
STFTETTLYR

SEQ ID NO: 7750 - protein, 9 aa, Homo sapiens
SSQKHWLFK

SEQ ID NO: 7751 - protein, 9 aa, Homo sapiens
VVLPSLTEK

SEQ ID NO: 7752 - protein, 9 aa, Homo sapiens
STLSFYQRR

SEQ ID NO: 7753 - protein, 9 aa, Homo sapiens
RLILPQMPK

SEQ ID NO: 7754 - protein, 10 aa, Homo sapiens
IIDMASAWAK

SEQ ID NO: 7755 - protein, 10 aa, Homo sapiens
GSFQLHLDSK

SEQ ID NO: 7756 - protein, 10 aa, Homo sapiens
RTSGLLSSWK

SEQ ID NO: 7757 - protein, 9 aa, Homo sapiens
ATSCPPTIK

SEQ ID NO: 7758 - protein, 9 aa, Homo sapiens
ATSNFSAVR

SEQ ID NO: 7759 - protein, 10 aa, Homo sapiens
KLMGISIRNK

SEQ ID NO: 7760 - protein, 10 aa, Homo sapiens
AFSQTHLMQK

SEQ ID NO: 7761 - protein, 11 aa, Homo sapiens
VHTYPFGWYQK

SEQ ID NO: 7762 - protein, 9 aa, Homo sapiens
ATNSQLFRR

SEQ ID NO: 7763 - protein, 10 aa, Homo sapiens
SSQDDGLINR

SEQ ID NO: 7764 - protein, 9 aa, Homo sapiens
AVQSVISGR

SEQ ID NO: 7765 - protein, 10 aa, Homo sapiens
ATPWPDFVPR

SEQ ID NO: 7766 - protein, 9 aa, Homo sapiens
TTLYRILQR

SEQ ID NO: 7767 - protein, 9 aa, Homo sapiens
SQDDGLINR

SEQ ID NO: 7768 - protein, 9 aa, Homo sapiens
SVQVGCLTR

SEQ ID NO: 7769 - protein, 9 aa, Homo sapiens
VTFSSFQRR

SEQ ID NO: 7770 - protein, 11 aa, Homo sapiens
GTFNFSQFFQQ

SEQ ID NO: 7771 - protein, 9 aa, Homo sapiens
RFPDAFVTF

SEQ ID NO: 7772 - protein, 10 aa, Homo sapiens
ADYADLLQTF

SEQ ID NO: 7773 - protein, 10 aa, Homo sapiens
SGYFSQHDLF

SEQ ID NO: 7774 - protein, 12 aa, Homo sapiens
SYNRFPDAFVTF

SEQ ID NO: 7775 - protein, 9 aa, Homo sapiens
GYFSQHDLF

SEQ ID NO: 7776 - protein, 9 aa, Homo sapiens
SYRVGVFGF

SEQ ID NO: 7777 - protein, 10 aa, Homo sapiens
RWASPRVARF

SEQ ID NO: 7778 - protein, 10 aa, Homo sapiens
NRFPDAFVTF

SEQ ID NO: 7779 - protein, 9 aa, Homo sapiens
DYADLLQTF

SEQ ID NO: 7780 - protein, 9 aa, Homo sapiens
VYLKKGAII

SEQ ID NO: 7781 - protein, 12 aa, Homo sapiens
RFPDAFVTFSSF

SEQ ID NO: 7782 - protein, 9 aa, Homo sapiens
SYNRFPDAF

SEQ ID NO: 7783 - protein, 9 aa, Homo sapiens
FYPAYEGQF

SEQ ID NO: 7784 - protein, 9 aa, Homo sapiens
TFPAETIRF

SEQ ID NO: 7785 - protein, 11 aa, Homo sapiens
SADYADLLQTF

SEQ ID NO: 7786 - protein, 9 aa, Homo sapiens
KFLVNVGQF

SEQ ID NO: 7787 - protein, 9 aa, Homo sapiens
IYDTIFAGL

SEQ ID NO: 7788 - protein, 9 aa, Homo sapiens
PYMPQCDAF

SEQ ID NO: 7789 - protein, 9 aa, Homo sapiens
LYFGTSGYF

SEQ ID NO: 7790 - protein, 9 aa, Homo sapiens
EFMPVQCKF

SEQ ID NO: 7791 - protein, 9 aa, Homo sapiens
NYKEFSELL

SEQ ID NO: 7792 - protein, 9 aa, Homo sapiens
EFSRKVPTF

SEQ ID NO: 7793 - protein, 9 aa, Homo sapiens
QYPGSYSDF

SEQ ID NO: 7794 - protein, 10 aa, Homo sapiens
FYTRLPFQKL

SEQ ID NO: 7795 - protein, 9 aa, Homo sapiens
SSQKHWLFK

SEQ ID NO: 7796 - protein, 9 aa, Homo sapiens
KSRTSGLLS

SEQ ID NO: 7797 - protein, 9 aa, Homo sapiens
GTRQLGRPK

SEQ ID NO: 7798 - protein, 9 aa, Homo sapiens
KVKNFYTRL

SEQ ID NO: 7799 - protein, 9 aa, Homo sapiens
SGRFRCPTK

SEQ ID NO: 7800 - protein, 9 aa, Homo sapiens
SSKTAFYQA

SEQ ID NO: 7801 - protein, 9 aa, Homo sapiens
RSQENPSPK

SEQ ID NO: 7802 - protein, 9 aa, Homo sapiens
GTRGTFNFS

SEQ ID NO: 7803 - protein, 10 aa, Homo sapiens
KSRTSGLLSS

SEQ ID NO: 7804 - protein, 9 aa, Homo sapiens
RARGNVFMY

SEQ ID NO: 7805 - protein, 10 aa, Homo sapiens
GTRSAIGKPK

SEQ ID NO: 7806 - protein, 10 aa, Homo sapiens
RARMQSLMGS

SEQ ID NO: 7807 - protein, 9 aa, Homo sapiens
KSRLEDIPV

SEQ ID NO: 7808 - protein, 10 aa, Homo sapiens
KSRLEDIPVA

SEQ ID NO: 7809 - protein, 9 aa, Homo sapiens
GTRTSTSPG

SEQ ID NO: 7810 - protein, 9 aa, Homo sapiens
ATRDYFIIC

SEQ ID NO: 7811 - protein, 9 aa, Homo sapiens
RNKVPMSEK

SEQ ID NO: 7812 - protein, 10 aa, Homo sapiens
KLMGISIRNK

SEQ ID NO: 7813 - protein, 9 aa, Homo sapiens
AKKDGTMNK

SEQ ID NO: 7814 - protein, 9 aa, Homo sapiens
WSKYISSLK

SEQ ID NO: 7815 - protein, 9 aa, Homo sapiens
YQRWEAQNK

SEQ ID NO: 7816 - protein, 9 aa, Homo sapiens
SQKDRGSGK

SEQ ID NO: 7817 - protein, 10 aa, Homo sapiens
HTYPFGWYQK

SEQ ID NO: 7818 - protein, 9 aa, Homo sapiens
CTGFGFLNV

SEQ ID NO: 7819 - protein, 9 aa, Homo sapiens
YTRLPFQKL

SEQ ID NO: 7820 - protein, 9 aa, Homo sapiens
NFQQVYLWK

SEQ ID NO: 7821 - protein, 9 aa, Homo sapiens
MPKALFRKK

SEQ ID NO: 7822 - protein, 9 aa, Homo sapiens
KVILEDKVK

SEQ ID NO: 7823 - protein, 9 aa, Homo sapiens
MQYFSHFIR

SEQ ID NO: 7824 - protein, 9 aa, Homo sapiens
STHGRLLGR

SEQ ID NO: 7825 - protein, 9 aa, Homo sapiens
EAFAEQFLR

SEQ ID NO: 7826 - protein, 10 aa, Homo sapiens
IMQYFSHFIR

SEQ ID NO: 7827 - protein, 9 aa, Homo sapiens
TTLYRILQR

SEQ ID NO: 7828 - protein, 9 aa, Homo sapiens
FVTFSSFQR

SEQ ID NO: 7829 - protein, 9 aa, Homo sapiens
DMASAWAKR

SEQ ID NO: 7830 - protein, 9 aa, Homo sapiens
STLSFYQRR

SEQ ID NO: 7831 - protein, 9 aa, Homo sapiens
LLVKIMSYR

SEQ ID NO: 7832 - protein, 11 aa, Homo sapiens
MIFDLVHSYNR

SEQ ID NO: 7833 - protein, 10 aa, Homo sapiens
EAIRAIFPSR

SEQ ID NO: 7834 - protein, 10 aa, Homo sapiens
HTYPFGWYQK

SEQ ID NO: 7835 - protein, 9 aa, Homo sapiens
MAGCWAGPR

SEQ ID NO: 7836 - protein, 12 aa, Homo sapiens
MMIFDLVHSYNR

SEQ ID NO: 7837 - protein, 10 aa, Homo sapiens
EVYGTRQLGR

SEQ ID NO: 7838 - protein, 9 aa, Homo sapiens
DANAPVAVR

SEQ ID NO: 7839 - protein, 9 aa, Homo sapiens
EFSELLPNR

SEQ ID NO: 7840 - protein, 9 aa, Homo sapiens
YAAPPLAER

SEQ ID NO: 7841 - protein, 10 aa, Homo sapiens
SSQDDGLINR

SEQ ID NO: 7842 - protein, 9 aa, Homo sapiens
AVQSVISGR

SEQ ID NO: 7843 - protein, 9 aa, Homo sapiens
FILDELTAR

SEQ ID NO: 7844 - protein, 9 aa, Homo sapiens
TLYRILQRR

SEQ ID NO: 7845 - protein, 8 aa, Homo sapiens
STLSFYQR

SEQ ID NO: 7846 - protein, 11 aa, Homo sapiens
DVASIHLLTAR

SEQ ID NO: 7847 - protein, 9 aa, Homo sapiens
DKVKNFYTR

SEQ ID NO: 7848 - protein, 9 aa, Homo sapiens
EVRGTQLKR

SEQ ID NO: 7849 - protein, 9 aa, Homo sapiens
RPQPRENIL

SEQ ID NO: 7850 - protein, 9 aa, Homo sapiens
RPLPFLTPF

SEQ ID NO: 7851 - protein, 10 aa, Homo sapiens
QPRACQRPQL

SEQ ID NO: 7852 - protein, 10 aa, Homo sapiens
RPASPTEAGL

SEQ ID NO: 7853 - protein, 10 aa, Homo sapiens
APENYGHGSL

SEQ ID NO: 7854 - protein, 11 aa, Homo sapiens
FPSRGLARLAL

SEQ ID NO: 7855 - protein, 9 aa, Homo sapiens
SPRVARFAT

SEQ ID NO: 7856 - protein, 9 aa, Homo sapiens
GPRPSRASC

SEQ ID NO: 7857 - protein, 10 aa, Homo sapiens
RPQPRENILL

SEQ ID NO: 7858 - protein, 12 aa, Homo sapiens
RPLPFLTPFSSL

SEQ ID NO: 7859 - protein, 9 aa, Homo sapiens
FPSRGLARL

SEQ ID NO: 7860 - protein, 9 aa, Homo sapiens
APVAVRSKV

SEQ ID NO: 7861 - protein, 9 aa, Homo sapiens
VPISTHGRL

SEQ ID NO: 7862 - protein, 10 aa, Homo sapiens
LPFLTPFSSL

SEQ ID NO: 7863 - protein, 10 aa, Homo sapiens
YPAYEGQFSL

SEQ ID NO: 7864 - protein, 11 aa, Homo sapiens
KPMSLDSWQSL

SEQ ID NO: 7865 - protein, 9 aa, Homo sapiens
APNASVLVF

SEQ ID NO: 7866 - protein, 11 aa, Homo sapiens
SPDDSAGASAL

SEQ ID NO: 7867 - protein, 10 aa, Homo sapiens
APSFCPLVVL

SEQ ID NO: 7868 - protein, 9 aa, Homo sapiens
IYRKPGISL

SEQ ID NO: 7869 - protein, 9 aa, Homo sapiens
WPAIDGSFL

SEQ ID NO: 7870 - protein, 9 aa, Homo sapiens
YPSLQDVPL

SEQ ID NO: 7871 - protein, 9 aa, Homo sapiens
IPVASLPDL

SEQ ID NO: 7872 - protein, 11 aa, Homo sapiens
SPTEAGLTTEL

SEQ ID NO: 7873 - protein, 9 aa, Homo sapiens
ILQRRFLAV

SEQ ID NO: 7874 - protein, 9 aa, Homo sapiens
SAMRHLYLL

SEQ ID NO: 7875 - protein, 8 aa, Homo sapiens
FLRTVQAL

SEQ ID NO: 7876 - protein, 9 aa, Homo sapiens
LMMQKFEKV

SEQ ID NO: 7877 - protein, 10 aa, Homo sapiens
RILQRRFLAV

SEQ ID NO: 7878 - protein, 11 aa, Homo sapiens
YRILQRRFLAV

SEQ ID NO: 7879 - protein, 8 aa, Homo sapiens
LQRRFLAV

SEQ ID NO: 7880 - protein, 8 aa, Homo sapiens
SAMRHLYL

SEQ ID NO: 7881 - protein, 9 aa, Homo sapiens
KQRARMQSL

SEQ ID NO: 7882 - protein, 12 aa, Homo sapiens
YQRRRFSPDDSA

SEQ ID NO: 7883 - protein, 9 aa, Homo sapiens
SQLFRRAVL

SEQ ID NO: 7884 - protein, 10 aa, Homo sapiens
CLRQKPANVL

SEQ ID NO: 7885 - protein, 12 aa, Homo sapiens
MPKALFRKKVIL

SEQ ID NO: 7886 - protein, 9 aa, Homo sapiens
HLMQKFEKV

SEQ ID NO: 7887 - protein, 8 aa, Homo sapiens
QLFRRAVL

SEQ ID NO: 7888 - protein, 9 aa, Homo sapiens
CLRQKPANV

SEQ ID NO: 7889 - protein, 9 aa, Homo sapiens
ALFRKKVIL

SEQ ID NO: 7890 - protein, 9 aa, Homo sapiens
EAKLRVLQF

SEQ ID NO: 7891 - protein, 9 aa, Homo sapiens
ECQWREHSL

SEQ ID NO: 7892 - protein, 9 aa, Homo sapiens
DLLGRFTDL

SEQ ID NO: 7893 - protein, 9 aa, Homo sapiens
GWYQKPMSL

SEQ ID NO: 7894 - protein, 8 aa, Homo sapiens
ALKFLASL

SEQ ID NO: 7895 - protein, 9 aa, Homo sapiens
DAQTKLLAV

SEQ ID NO: 7896 - protein, 9 aa, Homo sapiens
SLEEKSLSL

SEQ ID NO: 7897 - protein, 9 aa, Homo sapiens
DPSIRHFDV

SEQ ID NO: 7898 - protein, 8 aa, Homo sapiens
EACLITTL

SEQ ID NO: 7899 - protein, 8 aa, Homo sapiens
YRKPGISL

SEQ ID NO: 7900 - protein, 9 aa, Homo sapiens
CASERQQAL

SEQ ID NO: 7901 - protein, 9 aa, Homo sapiens
GLINRAKAV

SEQ ID NO: 7902 - protein, 8 aa, Homo sapiens
DLTPAKLL

SEQ ID NO: 7903 - protein, 9 aa, Homo sapiens
TDMMIFDLV

SEQ ID NO: 7904 - protein, 9 aa, Homo sapiens
RDYFIICPI

SEQ ID NO: 7905 - protein, 10 aa, Homo sapiens
RDYFIICPII

SEQ ID NO: 7906 - protein, 10 aa, Homo sapiens
LEIFTLLASI

SEQ ID NO: 7907 - protein, 10 aa, Homo sapiens
CDAFGSWEPV

SEQ ID NO: 7908 - protein, 9 aa, Homo sapiens
SEQAFLRTV

SEQ ID NO: 7909 - protein, 10 aa, Homo sapiens
TTDMMIFDLV

SEQ ID NO: 7910 - protein, 9 aa, Homo sapiens
LEPYLFWQI

SEQ ID NO: 7911 - protein, 10 aa, Homo sapiens
YEASVPSVPI

SEQ ID NO: 7912 - protein, 9 aa, Homo sapiens
ADLLQTFQV

SEQ ID NO: 7913 - protein, 12 aa, Homo sapiens
CTEDEACSFFTV

SEQ ID NO: 7914 - protein, 9 aa, Homo sapiens
FDLRNCWCV

SEQ ID NO: 7915 - protein, 10 aa, Homo sapiens
LELPEFLLFL

SEQ ID NO: 7916 - protein, 9 aa, Homo sapiens
VQFALGLPF

SEQ ID NO: 7917 - protein, 9 aa, Homo sapiens
RDLCCDGFV

SEQ ID NO: 7918 - protein, 9 aa, Homo sapiens
DEACSFFTV

SEQ ID NO: 7919 - protein, 9 aa, Homo sapiens
SQYPSLQDV

SEQ ID NO: 7920 - protein, 9 aa, Homo sapiens
ALTWVQTHI

SEQ ID NO: 7921 - protein, 9 aa, Homo sapiens
AQCPSLCNV

SEQ ID NO: 7922 - protein, 9 aa, Homo sapiens
GQYRASQKD

SEQ ID NO: 7923 - protein, 9 aa, Homo sapiens
GQWRQVQCN

SEQ ID NO: 7924 - protein, 9 aa, Homo sapiens
NLFGGKFLV

SEQ ID NO: 7925 - protein, 9 aa, Homo sapiens
SQTHLMQKF

SEQ ID NO: 7926 - protein, 9 aa, Homo sapiens
RQSRAPQAL

SEQ ID NO: 7927 - protein, 9 aa, Homo sapiens
KQVDQFLGV

SEQ ID NO: 7928 - protein, 9 aa, Homo sapiens
RLLGRSQAI

SEQ ID NO: 7929 - protein, 9 aa, Homo sapiens
EQTPERLFV

SEQ ID NO: 7930 - protein, 9 aa, Homo sapiens
GQQDVFPVL

SEQ ID NO: 7931 - protein, 8 aa, Homo sapiens
VQCDVQQV

SEQ ID NO: 7932 - protein, 9 aa, Homo sapiens
GQFSLEEKS

SEQ ID NO: 7933 - protein, 9 aa, Homo sapiens
LAAQSTLSF

SEQ ID NO: 7934 - protein, 9 aa, Homo sapiens
FMYHAPENY

SEQ ID NO: 7935 - protein, 9 aa, Homo sapiens
WTSDNVACM

SEQ ID NO: 7936 - protein, 9 aa, Homo sapiens
YINSTDTSY

SEQ ID NO: 7937 - protein, 9 aa, Homo sapiens
FSLFIQSLY

SEQ ID NO: 7938 - protein, 10 aa, Homo sapiens
FTATSFGHPY

SEQ ID NO: 7939 - protein, 9 aa, Homo sapiens
MIFDLVHSY

SEQ ID NO: 7940 - protein, 9 aa, Homo sapiens
LAKEVSCPM

SEQ ID NO: 7941 - protein, 9 aa, Homo sapiens
LAVSGPFHY

SEQ ID NO: 7942 - protein, 9 aa, Homo sapiens
FQNMLSGLY

SEQ ID NO: 7943 - protein, 9 aa, Homo sapiens
AASGNFSLF

SEQ ID NO: 7944 - protein, 10 aa, Homo sapiens
FAGLDLPSTF

SEQ ID NO: 7945 - protein, 9 aa, Homo sapiens
VQFALGLPF

SEQ ID NO: 7946 - protein, 9 aa, Homo sapiens
YLLCPFPPM

SEQ ID NO: 7947 - protein, 10 aa, Homo sapiens
LAAQSTLSFY

SEQ ID NO: 7948 - protein, 9 aa, Homo sapiens
FGFLNVSQL

SEQ ID NO: 7949 - protein, 9 aa, Homo sapiens
HSTDDYASF

SEQ ID NO: 7950 - protein, 9 aa, Homo sapiens
RSKVPDSEF

SEQ ID NO: 7951 - protein, 10 aa, Homo sapiens
SSRFPLGESF

SEQ ID NO: 7952 - protein, 9 aa, Homo sapiens
NLIVVTASY

SEQ ID NO: 7953 - protein, 9 aa, Homo sapiens
PLFPPREAF

SEQ ID NO: 7954 - protein, 9 aa, Homo sapiens
AARAPGACF

SEQ ID NO: 7955 - protein, 9 aa, Homo sapiens
VSLDSWQSL

SEQ ID NO: 7956 - protein, 9 aa, Homo sapiens
RLYFGTSGY

SEQ ID NO: 7957 - protein, 9 aa, Homo sapiens
SRFPLGESF

SEQ ID NO: 7958 - protein, 9 aa, Homo sapiens
NATCPGVTY

SEQ ID NO: 7959 - protein, 9 aa, Homo sapiens
KLLVKIMSY

SEQ ID NO: 7960 - protein, 9 aa, Homo sapiens
QAIPGTRSA

SEQ ID NO: 7961 - protein, 9 aa, Homo sapiens
ILRLGDQEF

SEQ ID NO: 7962 - protein, 9 aa, Homo sapiens
MLPGLTTEL

SEQ ID NO: 7963 - protein, 9 aa, Homo sapiens
FTNFQQVYL

SEQ ID NO: 7964 - protein, 9 aa, Homo sapiens
ILPQMPKAL

SEQ ID NO: 7965 - protein, 9 aa, Homo sapiens
SAMRHLYLL

SEQ ID NO: 7966 - protein, 9 aa, Homo sapiens
LLSSPSVLL

SEQ ID NO: 7967 - protein, 9 aa, Homo sapiens
LLADVQFAL

SEQ ID NO: 7968 - protein, 9 aa, Homo sapiens
ASLYFTCTL

SEQ ID NO: 7969 - protein, 9 aa, Homo sapiens
SLEEKSLSL

SEQ ID NO: 7970 - protein, 9 aa, Homo sapiens
YLLCPFPPM

SEQ ID NO: 7971 - protein, 9 aa, Homo sapiens
CSAMRHLYL

SEQ ID NO: 7972 - protein, 9 aa, Homo sapiens
RAQQQAIAL

SEQ ID NO: 7973 - protein, 9 aa, Homo sapiens
FATSCPPTI

SEQ ID NO: 7974 - protein, 9 aa, Homo sapiens
FGFLNVSQL

SEQ ID NO: 7975 - protein, 9 aa, Homo sapiens
FSAVRDLCL

SEQ ID NO: 7976 - protein, 9 aa, Homo sapiens
AAATWYYSL

SEQ ID NO: 7977 - protein, 9 aa, Homo sapiens
SCPPTIKEL

SEQ ID NO: 7978 - protein, 8 aa, Homo sapiens
VAPNASVL

SEQ ID NO: 7979 - protein, 9 aa, Homo sapiens
AIPGTRSAI

SEQ ID NO: 7980 - protein, 8 aa, Homo sapiens
NAPSFCPL

SEQ ID NO: 7981 - protein, 9 aa, Homo sapiens
NAPVAVRSK

SEQ ID NO: 7982 - protein, 8 aa, Homo sapiens
SGPTGSAM

SEQ ID NO: 7983 - protein, 9 aa, Homo sapiens
VDPASGEEL

SEQ ID NO: 7984 - protein, 9 aa, Homo sapiens
AQPLRPCEL

SEQ ID NO: 7985 - protein, 9 aa, Homo sapiens
ELPEFLLFL

SEQ ID NO: 7986 - protein, 9 aa, Homo sapiens
VSPGYVPAC

SEQ ID NO: 7987 - protein, 9 aa, Homo sapiens
FEPTGFQNM

SEQ ID NO: 7988 - protein, 12 aa, Homo sapiens
FSPDDSAGASAL

SEQ ID NO: 7989 - protein, 9 aa, Homo sapiens
FIPGSLTAR

SEQ ID NO: 7990 - protein, 9 aa, Homo sapiens
FATSCPPTI

SEQ ID NO: 7991 - protein, 9 aa, Homo sapiens
WSVFPPGPL

SEQ ID NO: 7992 - protein, 9 aa, Homo sapiens
LAAQSTLSF

SEQ ID NO: 7993 - protein, 9 aa, Homo sapiens
MSLDSWQSL

SEQ ID NO: 7994 - protein, 9 aa, Homo sapiens
FGFLNVSQL

SEQ ID NO: 7995 - protein, 9 aa, Homo sapiens
AATSNFSAV

SEQ ID NO: 7996 - protein, 9 aa, Homo sapiens
SALSPAAVI

SEQ ID NO: 7997 - protein, 9 aa, Homo sapiens
YLLCPFPPM

SEQ ID NO: 7998 - protein, 10 aa, Homo sapiens
YPAYEGQFSL

SEQ ID NO: 7999 - protein, 9 aa, Homo sapiens
LAKEVSCPM

SEQ ID NO: 8000 - protein, 9 aa, Homo sapiens
AAATWYYSL

SEQ ID NO: 8001 - protein, 9 aa, Homo sapiens
SAMRHLYLL

SEQ ID NO: 8002 - protein, 9 aa, Homo sapiens
ISGPTGSAM

SEQ ID NO: 8003 - protein, 9 aa, Homo sapiens
WTSDNVACM

SEQ ID NO: 8004 - protein, 9 aa, Homo sapiens
AAVGNLIVV

SEQ ID NO: 8005 - protein, 9 aa, Homo sapiens
CADSQGREL

SEQ ID NO: 8006 - protein, 9 aa, Homo sapiens
YAAPPLAER

SEQ ID NO: 8007 - protein, 9 aa, Homo sapiens
FIICPIIDM

SEQ ID NO: 8008 - protein, 9 aa, Homo sapiens
FATPWPDFV

SEQ ID NO: 8009 - protein, 9 aa, Homo sapiens
CASERQQAL

SEQ ID NO: 8010 - protein, 8 aa, Homo sapiens
YASFSRAL

SEQ ID NO: 8011 - protein, 9 aa, Homo sapiens
RAIFPSRGL

SEQ ID NO: 8012 - protein, 9 aa, Homo sapiens
PAYEGQFSL

SEQ ID NO: 8013 - protein, 8 aa, Homo sapiens
LAETGLEL

SEQ ID NO: 8014 - protein, 8 aa, Homo sapiens
FSLFIQSL

SEQ ID NO: 8015 - protein, 8 aa, Homo sapiens
FLTPFSSL

SEQ ID NO: 8016 - protein, 11 aa, Homo sapiens
YADTQSCTHSL

SEQ ID NO: 8017 - protein, 9 aa, Homo sapiens
FSAVRDLCL

SEQ ID NO: 8018 - protein, 9 aa, Homo sapiens
FTNFQQVYL

SEQ ID NO: 8019 - protein, 9 aa, Homo sapiens
IYDTIFAGL

SEQ ID NO: 8020 - protein, 9 aa, Homo sapiens
RFPDAFVTF

SEQ ID NO: 8021 - protein, 9 aa, Homo sapiens
SYSDFSTPL

SEQ ID NO: 8022 - protein, 9 aa, Homo sapiens
FYQALQNSL

SEQ ID NO: 8023 - protein, 9 aa, Homo sapiens
FYQEQAGSL

SEQ ID NO: 8024 - protein, 9 aa, Homo sapiens
TFPAETIRF

SEQ ID NO: 8025 - protein, 9 aa, Homo sapiens
RFPLGESFL

SEQ ID NO: 8026 - protein, 9 aa, Homo sapiens
SQPAGSTLF

SEQ ID NO: 8027 - protein, 9 aa, Homo sapiens
GQDSPAVYL

SEQ ID NO: 8028 - protein, 9 aa, Homo sapiens
YREAASGNF

SEQ ID NO: 8029 - protein, 9 aa, Homo sapiens
LQDVPLAAL

SEQ ID NO: 8030 - protein, 9 aa, Homo sapiens
FYPAYEGQF

SEQ ID NO: 8031 - protein, 9 aa, Homo sapiens
SYNRFPDAF

SEQ ID NO: 8032 - protein, 9 aa, Homo sapiens
MLPGLTTEL

SEQ ID NO: 8033 - protein, 9 aa, Homo sapiens
TEDEACSFF

SEQ ID NO: 8034 - protein, 10 aa, Homo sapiens
IFDANAPVAV

SEQ ID NO: 8035 - protein, 9 aa, Homo sapiens
HFDVAHVST

SEQ ID NO: 8036 - protein, 9 aa, Homo sapiens
VVDPSIRHF

SEQ ID NO: 8037 - protein, 9 aa, Homo sapiens
IFDLVHSYN

SEQ ID NO: 8038 - protein, 8 aa, Homo sapiens
IFDLVHSY

SEQ ID NO: 8039 - protein, 9 aa, Homo sapiens
CVDEAGQEL

SEQ ID NO: 8040 - protein, 10 aa, Homo sapiens
HFDVAHVSTA

SEQ ID NO: 8041 - protein, 8 aa, Homo sapiens
SFCPLVVL

SEQ ID NO: 8042 - protein, 9 aa, Homo sapiens
TYDQESHQV

SEQ ID NO: 8043 - protein, 9 aa, Homo sapiens
GQDLTPAKL

SEQ ID NO: 8044 - protein, 9 aa, Homo sapiens
HFDLRNCWC

SEQ ID NO: 8045 - protein, 9 aa, Homo sapiens
YRKPGISLL

SEQ ID NO: 8046 - protein, 9 aa, Homo sapiens
YRILQRRFL

SEQ ID NO: 8047 - protein, 9 aa, Homo sapiens
RRFLAVQSV

SEQ ID NO: 8048 - protein, 9 aa, Homo sapiens
TRLPFQKLM

SEQ ID NO: 8049 - protein, 9 aa, Homo sapiens
YRVGVFGFL

SEQ ID NO: 8050 - protein, 9 aa, Homo sapiens
SRFPLGESF

SEQ ID NO: 8051 - protein, 9 aa, Homo sapiens
LREPPARAL

SEQ ID NO: 8052 - protein, 9 aa, Homo sapiens
WREHSLRPL

SEQ ID NO: 8053 - protein, 9 aa, Homo sapiens
RRFQAPEPL

SEQ ID NO: 8054 - protein, 9 aa, Homo sapiens
CRQGSWSVF

SEQ ID NO: 8055 - protein, 9 aa, Homo sapiens
LRQKPANVL

SEQ ID NO: 8056 - protein, 10 aa, Homo sapiens
YTRLPFQKLM

SEQ ID NO: 8057 - protein, 9 aa, Homo sapiens
YREAASGNF

SEQ ID NO: 8058 - protein, 9 aa, Homo sapiens
ARATNSQLF

SEQ ID NO: 8059 - protein, 10 aa, Homo sapiens
SRFPLGESFL

SEQ ID NO: 8060 - protein, 9 aa, Homo sapiens
QRARMQSLM

SEQ ID NO: 8061 - protein, 9 aa, Homo sapiens
RRFPEVSGY

SEQ ID NO: 8062 - protein, 8 aa, Homo sapiens
ARGNVFMY

SEQ ID NO: 8063 - protein, 9 aa, Homo sapiens
RNPNYPYEF

SEQ ID NO: 8064 - protein, 9 aa, Homo sapiens
CNGPPEQVF

SEQ ID NO: 8065 - protein, 9 aa, Homo sapiens
SCPPTIKEL

SEQ ID NO: 8066 - protein, 10 aa, Homo sapiens
GRNPNYPYEF

SEQ ID NO: 8067 - protein, 9 aa, Homo sapiens
RARGNVFMY

SEQ ID NO: 8068 - protein, 9 aa, Homo sapiens
RNGDYQAVQ

SEQ ID NO: 8069 - protein, 9 aa, Homo sapiens
KRSLWVEVD

SEQ ID NO: 8070 - protein, 8 aa, Homo sapiens
RRFPEVSG

SEQ ID NO: 8071 - protein, 9 aa, Homo sapiens
TRDYFIICP

SEQ ID NO: 8072 - protein, 9 aa, Homo sapiens
MIFDLVHSY

SEQ ID NO: 8073 - protein, 9 aa, Homo sapiens
RRVSPGYVP

SEQ ID NO: 8074 - protein, 9 aa, Homo sapiens
YRKPGISLL

SEQ ID NO: 8075 - protein, 9 aa, Homo sapiens
YRILQRRFL

SEQ ID NO: 8076 - protein, 9 aa, Homo sapiens
SYSDFSTPL

SEQ ID NO: 8077 - protein, 9 aa, Homo sapiens
FYQALQNSL

SEQ ID NO: 8078 - protein, 9 aa, Homo sapiens
FYQEQAGSL

SEQ ID NO: 8079 - protein, 9 aa, Homo sapiens
YRVGVFGFL

SEQ ID NO: 8080 - protein, 9 aa, Homo sapiens
TRLPFQKLM

SEQ ID NO: 8081 - protein, 9 aa, Homo sapiens
ARATNSQLF

SEQ ID NO: 8082 - protein, 9 aa, Homo sapiens
LYFGTSGYF

SEQ ID NO: 8083 - protein, 9 aa, Homo sapiens
RRFLAVQSV

SEQ ID NO: 8084 - protein, 9 aa, Homo sapiens
SRFPLGESF

SEQ ID NO: 8085 - protein, 9 aa, Homo sapiens
CRQGSWSVF

SEQ ID NO: 8086 - protein, 9 aa, Homo sapiens
FWSKYISSL

SEQ ID NO: 8087 - protein, 9 aa, Homo sapiens
RRFQAPEPL

SEQ ID NO: 8088 - protein, 9 aa, Homo sapiens
SYNRFPDAF

SEQ ID NO: 8089 - protein, 9 aa, Homo sapiens
FYPAYEGQF

SEQ ID NO: 8090 - protein, 10 aa, Homo sapiens
GRNPNYPYEF

SEQ ID NO: 8091 - protein, 8 aa, Homo sapiens
YRKPGISL

SEQ ID NO: 8092 - protein, 10 aa, Homo sapiens
NRFPDAFVTF

SEQ ID NO: 8093 - protein, 8 aa, Homo sapiens
ARGNVFMY

SEQ ID NO: 8094 - protein, 9 aa, Homo sapiens
RRFPEVSGY

SEQ ID NO: 8095 - protein, 9 aa, Homo sapiens
RNPNYPYEF

SEQ ID NO: 8096 - protein, 10 aa, Homo sapiens
ARVEAAATWY

SEQ ID NO: 8097 - protein, 9 aa, Homo sapiens
NYKEFSELL

SEQ ID NO: 8098 - protein, 9 aa, Homo sapiens
NYGHGSLEL

SEQ ID NO: 8099 - protein, 9 aa, Homo sapiens
NRFPDAFVT

SEQ ID NO: 8100 - protein, 10 aa, Homo sapiens
ASEVFTSFQY

SEQ ID NO: 8101 - protein, 12 aa, Homo sapiens
WTGDYEGGTAPY

SEQ ID NO: 8102 - protein, 10 aa, Homo sapiens
MTHDSVWNFH

SEQ ID NO: 8103 - protein, 12 aa, Homo sapiens
WTGSAPILQQYY

SEQ ID NO: 8104 - protein, 10 aa, Homo sapiens
GSAPILQQYY

SEQ ID NO: 8105 - protein, 11 aa, Homo sapiens
WTGSAPILQQY

SEQ ID NO: 8106 - protein, 11 aa, Homo sapiens
MASEVFTSFQY

SEQ ID NO: 8107 - protein, 10 aa, Homo sapiens
SSPNAILGKY

SEQ ID NO: 8108 - protein, 9 aa, Homo sapiens
GSAPILQQY

SEQ ID NO: 8109 - protein, 9 aa, Homo sapiens
ILNDTGCHY

SEQ ID NO: 8110 - protein, 10 aa, Homo sapiens
ILGSFELQLY

SEQ ID NO: 8111 - protein, 11 aa, Homo sapiens
VLDPRTPSDHY

SEQ ID NO: 8112 - protein, 11 aa, Homo sapiens
DTERNLTVDTY

SEQ ID NO: 8113 - protein, 12 aa, Homo sapiens
VTSSPNAILGKY

SEQ ID NO: 8114 - protein, 8 aa, Homo sapiens
KSEENILY

SEQ ID NO: 8115 - protein, 9 aa, Homo sapiens
LTDVKFSLE

SEQ ID NO: 8116 - protein, 9 aa, Homo sapiens
VMDHAFLLL

SEQ ID NO: 8117 - protein, 9 aa, Homo sapiens
KSEENILYL

SEQ ID NO: 8118 - protein, 9 aa, Homo sapiens
FSEVNGDRL

SEQ ID NO: 8119 - protein, 8 aa, Homo sapiens
LTDVKFSL

SEQ ID NO: 8120 - protein, 10 aa, Homo sapiens
ILNDTGCHYV

SEQ ID NO: 8121 - protein, 10 aa, Homo sapiens
FQYPEFSIEL

SEQ ID NO: 8122 - protein, 9 aa, Homo sapiens
ILGKYQLNV

SEQ ID NO: 8123 - protein, 10 aa, Homo sapiens
LLGNSVNFTV

SEQ ID NO: 8124 - protein, 9 aa, Homo sapiens
QVMDHAFLL

SEQ ID NO: 8125 - protein, 9 aa, Homo sapiens
VMDHAFLLL

SEQ ID NO: 8126 - protein, 9 aa, Homo sapiens
VLDCCISLL

SEQ ID NO: 8127 - protein, 9 aa, Homo sapiens
ILGSFELQL

SEQ ID NO: 8128 - protein, 10 aa, Homo sapiens
RQVMDHAFLL

SEQ ID NO: 8129 - protein, 10 aa, Homo sapiens
WVFAGILTTV

SEQ ID NO: 8130 - protein, 9 aa, Homo sapiens
FIVYDTRFV

SEQ ID NO: 8131 - protein, 10 aa, Homo sapiens
MMSFEKGQGV

SEQ ID NO: 8132 - protein, 9 aa, Homo sapiens
RLIWLVKMV

SEQ ID NO: 8133 - protein, 10 aa, Homo sapiens
IPLTDVKFSL

SEQ ID NO: 8134 - protein, 11 aa, Homo sapiens
VLLGNSVNFTV

SEQ ID NO: 8135 - protein, 11 aa, Homo sapiens
YILNDTGCHYV

SEQ ID NO: 8136 - protein, 10 aa, Homo sapiens
MMDASKELQV

SEQ ID NO: 8137 - protein, 9 aa, Homo sapiens
KMVNGQEEL

SEQ ID NO: 8138 - protein, 10 aa, Homo sapiens
AILGKYQLNV

SEQ ID NO: 8139 - protein, 11 aa, Homo sapiens
AMMSFEKGQGV

SEQ ID NO: 8140 - protein, 9 aa, Homo sapiens
TLAIPLTDV

SEQ ID NO: 8141 - protein, 9 aa, Homo sapiens
IMASEVFTS

SEQ ID NO: 8142 - protein, 10 aa, Homo sapiens
SLAILDDEPV

SEQ ID NO: 8143 - protein, 12 aa, Homo sapiens
SMTHDSVWNFHV

SEQ ID NO: 8144 - protein, 9 aa, Homo sapiens
GQCWVFAGI

SEQ ID NO: 8145 - protein, 10 aa, Homo sapiens
QVMDHAFLLL

SEQ ID NO: 8146 - protein, 9 aa, Homo sapiens
ILTTVLRAL

SEQ ID NO: 8147 - protein, 10 aa, Homo sapiens
FGQCWVFAGI

SEQ ID NO: 8148 - protein, 12 aa, Homo sapiens
DVLLGNSVNFTV

SEQ ID NO: 8149 - protein, 9 aa, Homo sapiens
WVFAGILTT

SEQ ID NO: 8150 - protein, 12 aa, Homo sapiens
EYILNDTGCHYV

SEQ ID NO: 8151 - protein, 8 aa, Homo sapiens
VMDHAFLL

SEQ ID NO: 8152 - protein, 9 aa, Homo sapiens
CIFKNTLAI

SEQ ID NO: 8153 - protein, 9 aa, Homo sapiens
ILDDEPVIR

SEQ ID NO: 8154 - protein, 10 aa, Homo sapiens
ILDDEPVIRG

SEQ ID NO: 8155 - protein, 9 aa, Homo sapiens
PLTDVKFSL

SEQ ID NO: 8156 - protein, 9 aa, Homo sapiens
AILDDEPVI

SEQ ID NO: 8157 - protein, 12 aa, Homo sapiens
TLQNESGKEVTV

SEQ ID NO: 8158 - protein, 8 aa, Homo sapiens
ILDDEPVI

SEQ ID NO: 8159 - protein, 10 aa, Homo sapiens
TLQNESGKEV

SEQ ID NO: 8160 - protein, 9 aa, Homo sapiens
VFAGILTTV

SEQ ID NO: 8161 - protein, 10 aa, Homo sapiens
SLESLGISSL

SEQ ID NO: 8162 - protein, 9 aa, Homo sapiens
VLLGNSVNF

SEQ ID NO: 8163 - protein, 9 aa, Homo sapiens
ALGIPARSV

SEQ ID NO: 8164 - protein, 9 aa, Homo sapiens
VLDPRTPSD

SEQ ID NO: 8165 - protein, 9 aa, Homo sapiens
SIAKHTLVV

SEQ ID NO: 8166 - protein, 9 aa, Homo sapiens
KGYDGWQAV

SEQ ID NO: 8167 - protein, 8 aa, Homo sapiens
FLNQDNAV

SEQ ID NO: 8168 - protein, 9 aa, Homo sapiens
SVQSDDVLL

SEQ ID NO: 8169 - protein, 10 aa, Homo sapiens
SLQTSDHGTV

SEQ ID NO: 8170 - protein, 9 aa, Homo sapiens
ALQNVNILG

SEQ ID NO: 8171 - protein, 9 aa, Homo sapiens
QVSEVTLTL

SEQ ID NO: 8172 - protein, 9 aa, Homo sapiens
YVNENGEKI

SEQ ID NO: 8173 - protein, 10 aa, Homo sapiens
AMCAMMSFEK

SEQ ID NO: 8174 - protein, 10 aa, Homo sapiens
KMAKLCDLNK

SEQ ID NO: 8175 - protein, 10 aa, Homo sapiens
QLYTGKKMAK

SEQ ID NO: 8176 - protein, 9 aa, Homo sapiens
SVNFTVILK

SEQ ID NO: 8177 - protein, 9 aa, Homo sapiens
SLLTESSLK

SEQ ID NO: 8178 - protein, 10 aa, Homo sapiens
ILGKYQLNVK

SEQ ID NO: 8179 - protein, 10 aa, Homo sapiens
ISLLTESSLK

SEQ ID NO: 8180 - protein, 10 aa, Homo sapiens
ISMETTSIGK

SEQ ID NO: 8181 - protein, 10 aa, Homo sapiens
AWMKRPDLPK

SEQ ID NO: 8182 - protein, 10 aa, Homo sapiens
TLAIPLTDVK

SEQ ID NO: 8183 - protein, 11 aa, Homo sapiens
RAMCAMMSFEK

SEQ ID NO: 8184 - protein, 10 aa, Homo sapiens
NSVNFTVILK

SEQ ID NO: 8185 - protein, 10 aa, Homo sapiens
STGPNPSIAK

SEQ ID NO: 8186 - protein, 11 aa, Homo sapiens
AILGKYQLNVK

SEQ ID NO: 8187 - protein, 10 aa, Homo sapiens
KTGPKKFIVK

SEQ ID NO: 8188 - protein, 11 aa, Homo sapiens
VTSSPNAILGK

SEQ ID NO: 8189 - protein, 9 aa, Homo sapiens
YLLFNPWCK

SEQ ID NO: 8190 - protein, 11 aa, Homo sapiens
ILYLLFNPWCK

SEQ ID NO: 8191 - protein, 9 aa, Homo sapiens
IIAEIVESK

SEQ ID NO: 8192 - protein, 9 aa, Homo sapiens
VLNQPLQSY

SEQ ID NO: 8193 - protein, 9 aa, Homo sapiens
SVNFTVILK

SEQ ID NO: 8194 - protein, 10 aa, Homo sapiens
AMCAMMSFEK

SEQ ID NO: 8195 - protein, 10 aa, Homo sapiens
ISMETTSIGK

SEQ ID NO: 8196 - protein, 10 aa, Homo sapiens
NSVNFTVILK

SEQ ID NO: 8197 - protein, 10 aa, Homo sapiens
STGPNPSIAK

SEQ ID NO: 8198 - protein, 9 aa, Homo sapiens
SLLTESSLK

SEQ ID NO: 8199 - protein, 10 aa, Homo sapiens
TSSPNAILGK

SEQ ID NO: 8200 - protein, 9 aa, Homo sapiens
HVWTDAWMK

SEQ ID NO: 8201 - protein, 12 aa, Homo sapiens
GSFELQLYTGKK

SEQ ID NO: 8202 - protein, 11 aa, Homo sapiens
GSFELQLYTGK

SEQ ID NO: 8203 - protein, 9 aa, Homo sapiens
SSPNAILGK

SEQ ID NO: 8204 - protein, 9 aa, Homo sapiens
ATLQNESGK

SEQ ID NO: 8205 - protein, 10 aa, Homo sapiens
SVNFTVILKR

SEQ ID NO: 8206 - protein, 11 aa, Homo sapiens
VTSSPNAILGK

SEQ ID NO: 8207 - protein, 10 aa, Homo sapiens
KTGPKKFIVK

SEQ ID NO: 8208 - protein, 9 aa, Homo sapiens
VNFTVILKR

SEQ ID NO: 8209 - protein, 9 aa, Homo sapiens
QTSSPVFRR

SEQ ID NO: 8210 - protein, 9 aa, Homo sapiens
SYHQLKLEF

SEQ ID NO: 8211 - protein, 9 aa, Homo sapiens
TYINSLAIL

SEQ ID NO: 8212 - protein, 10 aa, Homo sapiens
VFTSFQYPEF

SEQ ID NO: 8213 - protein, 9 aa, Homo sapiens
IFIVYDTRF

SEQ ID NO: 8214 - protein, 10 aa, Homo sapiens
YYNTKQAVCF

SEQ ID NO: 8215 - protein, 10 aa, Homo sapiens
IMASEVFTSF

SEQ ID NO: 8216 - protein, 9 aa, Homo sapiens
RAMCAMMSF

SEQ ID NO: 8217 - protein, 9 aa, Homo sapiens
QYPEFSIEL

SEQ ID NO: 8218 - protein, 10 aa, Homo sapiens
KTYINSLAIL

SEQ ID NO: 8219 - protein, 8 aa, Homo sapiens
VYDTRFVF

SEQ ID NO: 8220 - protein, 10 aa, Homo sapiens
QSYHQLKLEF

SEQ ID NO: 8221 - protein, 9 aa, Homo sapiens
EFQTSSPVF

SEQ ID NO: 8222 - protein, 9 aa, Homo sapiens
VLLGNSVNF

SEQ ID NO: 8223 - protein, 11 aa, Homo sapiens
IFIVYDTRFVF

SEQ ID NO: 8224 - protein, 9 aa, Homo sapiens
IVYDTRFVF

SEQ ID NO: 8225 - protein, 9 aa, Homo sapiens
KTYINSLAI

SEQ ID NO: 8226 - protein, 9 aa, Homo sapiens
AQKIVLITK

SEQ ID NO: 8227 - protein, 9 aa, Homo sapiens
KFIVKLSSK

SEQ ID NO: 8228 - protein, 9 aa, Homo sapiens
MAKLCDLNK

SEQ ID NO: 8229 - protein, 11 aa, Homo sapiens
RAMCAMMSFEK

SEQ ID NO: 8230 - protein, 10 aa, Homo sapiens
KQVKEINAQK

SEQ ID NO: 8231 - protein, 9 aa, Homo sapiens
AIRKGDIFI

SEQ ID NO: 8232 - protein, 10 aa, Homo sapiens
KTGPKKFIVK

SEQ ID NO: 8233 - protein, 9 aa, Homo sapiens
VLRALGIPA

SEQ ID NO: 8234 - protein, 10 aa, Homo sapiens
RPVKENFLHM

SEQ ID NO: 8235 - protein, 9 aa, Homo sapiens
SVNFTVILK

SEQ ID NO: 8236 - protein, 10 aa, Homo sapiens
KMAKLCDLNK

SEQ ID NO: 8237 - protein, 9 aa, Homo sapiens
QVKEINAQK

SEQ ID NO: 8238 - protein, 10 aa, Homo sapiens
RRRDITYEYK

SEQ ID NO: 8239 - protein, 9 aa, Homo sapiens
RRRDITYEY

SEQ ID NO: 8240 - protein, 9 aa, Homo sapiens
RLIWLVKMV

SEQ ID NO: 8241 - protein, 9 aa, Homo sapiens
RKGDIFIVY

SEQ ID NO: 8242 - protein, 9 aa, Homo sapiens
DTRFVFSEV

SEQ ID NO: 8243 - protein, 10 aa, Homo sapiens
NVKTGNHILK

SEQ ID NO: 8244 - protein, 9 aa, Homo sapiens
GDRLIWLVK

SEQ ID NO: 8245 - protein, 9 aa, Homo sapiens
HTLVVLDPR

SEQ ID NO: 8246 - protein, 10 aa, Homo sapiens
HVWTDAWMKR

SEQ ID NO: 8247 - protein, 10 aa, Homo sapiens
HAFLLLSSER

SEQ ID NO: 8248 - protein, 10 aa, Homo sapiens
EFQTSSPVFR

SEQ ID NO: 8249 - protein, 9 aa, Homo sapiens
QTSSPVFRR

SEQ ID NO: 8250 - protein, 9 aa, Homo sapiens
DIFIVYDTR

SEQ ID NO: 8251 - protein, 10 aa, Homo sapiens
SVNFTVILKR

SEQ ID NO: 8252 - protein, 10 aa, Homo sapiens
FQTSSPVFRR

SEQ ID NO: 8253 - protein, 10 aa, Homo sapiens
MVFMPDEDER

SEQ ID NO: 8254 - protein, 12 aa, Homo sapiens
NFHVWTDAWMKR

SEQ ID NO: 8255 - protein, 9 aa, Homo sapiens
STKAVGQDR

SEQ ID NO: 8256 - protein, 9 aa, Homo sapiens
AFLLLSSER

SEQ ID NO: 8257 - protein, 11 aa, Homo sapiens
EFQTSSPVFRR

SEQ ID NO: 8258 - protein, 9 aa, Homo sapiens
ESSLKPTDR

SEQ ID NO: 8259 - protein, 9 aa, Homo sapiens
EVFTSFQYP

SEQ ID NO: 8260 - protein, 9 aa, Homo sapiens
SIELPNTGR

SEQ ID NO: 8261 - protein, 11 aa, Homo sapiens
EFSIELPNTGR

SEQ ID NO: 8262 - protein, 9 aa, Homo sapiens
VNFTVILKR

SEQ ID NO: 8263 - protein, 9 aa, Homo sapiens
SPVFRRGQV

SEQ ID NO: 8264 - protein, 10 aa, Homo sapiens
RDPVLVCRAM

SEQ ID NO: 8265 - protein, 10 aa, Homo sapiens
SPVFRRGQVF

SEQ ID NO: 8266 - protein, 10 aa, Homo sapiens
LPNTGRIGQL

SEQ ID NO: 8267 - protein, 9 aa, Homo sapiens
KPTDRRDPV

SEQ ID NO: 8268 - protein, 10 aa, Homo sapiens
KPTDRRDPVL

SEQ ID NO: 8269 - protein, 9 aa, Homo sapiens
APYKWTGSA

SEQ ID NO: 8270 - protein, 9 aa, Homo sapiens
NPSIAKHTL

SEQ ID NO: 8271 - protein, 10 aa, Homo sapiens
RPVKENFLHM

SEQ ID NO: 8272 - protein, 9 aa, Homo sapiens
IPARSVTGF

SEQ ID NO: 8273 - protein, 11 aa, Homo sapiens
APYKWTGSAPI

SEQ ID NO: 8274 - protein, 9 aa, Homo sapiens
FPQCHPGQV

SEQ ID NO: 8275 - protein, 9 aa, Homo sapiens
QPLQSYHQL

SEQ ID NO: 8276 - protein, 9 aa, Homo sapiens
GPKKFIVKL

SEQ ID NO: 8277 - protein, 8 aa, Homo sapiens
GPSPLTAI

SEQ ID NO: 8278 - protein, 8 aa, Homo sapiens
YPEFSIEL

SEQ ID NO: 8279 - protein, 9 aa, Homo sapiens
ILKRKTAAL

SEQ ID NO: 8280 - protein, 12 aa, Homo sapiens
FTVILKRKTAAL

SEQ ID NO: 8281 - protein, 10 aa, Homo sapiens
VILKRKTAAL

SEQ ID NO: 8282 - protein, 8 aa, Homo sapiens
LKRKTAAL

SEQ ID NO: 8283 - protein, 11 aa, Homo sapiens
TVILKRKTAAL

SEQ ID NO: 8284 - protein, 10 aa, Homo sapiens
ILKRKTAALQ

SEQ ID NO: 8285 - protein, 9 aa, Homo sapiens
VILKRKTAA

SEQ ID NO: 8286 - protein, 8 aa, Homo sapiens
ILKRKTAA

SEQ ID NO: 8287 - protein, 12 aa, Homo sapiens
ILKRKTAALQNV

SEQ ID NO: 8288 - protein, 10 aa, Homo sapiens
HLRLVLNQPL

SEQ ID NO: 8289 - protein, 9 aa, Homo sapiens
SIKCKPWNF

SEQ ID NO: 8290 - protein, 9 aa, Homo sapiens
EINAQKIVL

SEQ ID NO: 8291 - protein, 9 aa, Homo sapiens
NPSIAKHTL

SEQ ID NO: 8292 - protein, 8 aa, Homo sapiens
NCIFKNTL

SEQ ID NO: 8293 - protein, 9 aa, Homo sapiens
DSKTYINSL

SEQ ID NO: 8294 - protein, 9 aa, Homo sapiens
NAILGKYQL

SEQ ID NO: 8295 - protein, 9 aa, Homo sapiens
DVKFSLESL

SEQ ID NO: 8296 - protein, 8 aa, Homo sapiens
AILGKYQL

SEQ ID NO: 8297 - protein, 9 aa, Homo sapiens
PLTDVKFSL

SEQ ID NO: 8298 - protein, 9 aa, Homo sapiens
GPKKFIVKL

SEQ ID NO: 8299 - protein, 9 aa, Homo sapiens
WEFQTSSPV

SEQ ID NO: 8300 - protein, 9 aa, Homo sapiens
KENFLHMSV

SEQ ID NO: 8301 - protein, 10 aa, Homo sapiens
RQVMDHAFLL

SEQ ID NO: 8302 - protein, 11 aa, Homo sapiens
LEFSTGPNPSI

SEQ ID NO: 8303 - protein, 10 aa, Homo sapiens
YDTRFVFSEV

SEQ ID NO: 8304 - protein, 10 aa, Homo sapiens
WEFQTSSPVF

SEQ ID NO: 8305 - protein, 10 aa, Homo sapiens
IDFLNQDNAV

SEQ ID NO: 8306 - protein, 9 aa, Homo sapiens
RGFIIAEIV

SEQ ID NO: 8307 - protein, 9 aa, Homo sapiens
KTYINSLAI

SEQ ID NO: 8308 - protein, 9 aa, Homo sapiens
GQCWVFAGI

SEQ ID NO: 8309 - protein, 12 aa, Homo sapiens
SEVNGDRLIWLV

SEQ ID NO: 8310 - protein, 9 aa, Homo sapiens
RLIWLVKMV

SEQ ID NO: 8311 - protein, 9 aa, Homo sapiens
GQLLVCNCI

SEQ ID NO: 8312 - protein, 9 aa, Homo sapiens
GQVFHLRLV

SEQ ID NO: 8313 - protein, 9 aa, Homo sapiens
KGYDGWQAV

SEQ ID NO: 8314 - protein, 8 aa, Homo sapiens
KEINAQKI

SEQ ID NO: 8315 - protein, 8 aa, Homo sapiens
GQEELHVI

SEQ ID NO: 8316 - protein, 8 aa, Homo sapiens
FQYPEFSI

SEQ ID NO: 8317 - protein, 9 aa, Homo sapiens
SIAKHTLVV

SEQ ID NO: 8318 - protein, 9 aa, Homo sapiens
LQSYHQLKL

SEQ ID NO: 8319 - protein, 9 aa, Homo sapiens
MASEVFTSF

SEQ ID NO: 8320 - protein, 9 aa, Homo sapiens
RAMCAMMSF

SEQ ID NO: 8321 - protein, 9 aa, Homo sapiens
IVYDTRFVF

SEQ ID NO: 8322 - protein, 10 aa, Homo sapiens
FIVYDTRFVF

SEQ ID NO: 8323 - protein, 9 aa, Homo sapiens
FAGILTTVL

SEQ ID NO: 8324 - protein, 9 aa, Homo sapiens
FTSFQYPEF

SEQ ID NO: 8325 - protein, 10 aa, Homo sapiens
CRAMCAMMSF

SEQ ID NO: 8326 - protein, 9 aa, Homo sapiens
KTYINSLAI

SEQ ID NO: 8327 - protein, 9 aa, Homo sapiens
YVNENGEKI

SEQ ID NO: 8328 - protein, 9 aa, Homo sapiens
GSAPILQQY

SEQ ID NO: 8329 - protein, 10 aa, Homo sapiens
IMASEVFTSF

SEQ ID NO: 8330 - protein, 10 aa, Homo sapiens
LAIPLTDVKF

SEQ ID NO: 8331 - protein, 9 aa, Homo sapiens
VLNQPLQSY

SEQ ID NO: 8332 - protein, 9 aa, Homo sapiens
ILNDTGCHY

SEQ ID NO: 8333 - protein, 9 aa, Homo sapiens
RRRDITYEY

SEQ ID NO: 8334 - protein, 8 aa, Homo sapiens
VSHHTWEF

SEQ ID NO: 8335 - protein, 9 aa, Homo sapiens
SIKCKPWNF

SEQ ID NO: 8336 - protein, 9 aa, Homo sapiens
KGYDGWQAV

SEQ ID NO: 8337 - protein, 9 aa, Homo sapiens
AVSHHTWEF

SEQ ID NO: 8338 - protein, 9 aa, Homo sapiens
SAHDTERNL

SEQ ID NO: 8339 - protein, 10 aa, Homo sapiens
NAVSHHTWEF

SEQ ID NO: 8340 - protein, 9 aa, Homo sapiens
VMDHAFLLL

SEQ ID NO: 8341 - protein, 9 aa, Homo sapiens
VLDCCISLL

SEQ ID NO: 8342 - protein, 9 aa, Homo sapiens
KTYINSLAI

SEQ ID NO: 8343 - protein, 9 aa, Homo sapiens
MASEVFTSF

SEQ ID NO: 8344 - protein, 9 aa, Homo sapiens
FAGILTTVL

SEQ ID NO: 8345 - protein, 9 aa, Homo sapiens
RAMCAMMSF

SEQ ID NO: 8346 - protein, 9 aa, Homo sapiens
VTSSPNAIL

SEQ ID NO: 8347 - protein, 9 aa, Homo sapiens
CGPSPLTAI

SEQ ID NO: 8348 - protein, 9 aa, Homo sapiens
IVYDTRFVF

SEQ ID NO: 8349 - protein, 9 aa, Homo sapiens
KSEENILYL

SEQ ID NO: 8350 - protein, 9 aa, Homo sapiens
CIFKNTLAI

SEQ ID NO: 8351 - protein, 9 aa, Homo sapiens
FSTGPNPSI

SEQ ID NO: 8352 - protein, 9 aa, Homo sapiens
QYPEFSIEL

SEQ ID NO: 8353 - protein, 9 aa, Homo sapiens
SAHDTERNL

SEQ ID NO: 8354 - protein, 9 aa, Homo sapiens
ILTTVLRAL

SEQ ID NO: 8355 - protein, 8 aa, Homo sapiens
FCCGPSPL

SEQ ID NO: 8356 - protein, 9 aa, Homo sapiens
RRPVKENFL

SEQ ID NO: 8357 - protein, 9 aa, Homo sapiens
SSPVFRRGQ

SEQ ID NO: 8358 - protein, 10 aa, Homo sapiens
SSPVFRRGQV

SEQ ID NO: 8359 - protein, 9 aa, Homo sapiens
ILKRKTAAL

SEQ ID NO: 8360 - protein, 9 aa, Homo sapiens
VFCCGPSPL

SEQ ID NO: 8361 - protein, 9 aa, Homo sapiens
MASEVFTSF

SEQ ID NO: 8362 - protein, 9 aa, Homo sapiens
FAGILTTVL

SEQ ID NO: 8363 - protein, 9 aa, Homo sapiens
RAMCAMMSF

SEQ ID NO: 8364 - protein, 9 aa, Homo sapiens
FSTGPNPSI

SEQ ID NO: 8365 - protein, 9 aa, Homo sapiens
AALQNVNIL

SEQ ID NO: 8366 - protein, 9 aa, Homo sapiens
MSVQSDDVL

SEQ ID NO: 8367 - protein, 9 aa, Homo sapiens
IVYDTRFVF

SEQ ID NO: 8368 - protein, 9 aa, Homo sapiens
KTYINSLAI

SEQ ID NO: 8369 - protein, 9 aa, Homo sapiens
IAKHTLVVL

SEQ ID NO: 8370 - protein, 9 aa, Homo sapiens
ISLLTESSL

SEQ ID NO: 8371 - protein, 9 aa, Homo sapiens
MSFEKGQGV

SEQ ID NO: 8372 - protein, 10 aa, Homo sapiens
FQYPEFSIEL

SEQ ID NO: 8373 - protein, 9 aa, Homo sapiens
SAHDTERNL

SEQ ID NO: 8374 - protein, 9 aa, Homo sapiens
QVSEVTLTL

SEQ ID NO: 8375 - protein, 9 aa, Homo sapiens
NAILGKYQL

SEQ ID NO: 8376 - protein, 9 aa, Homo sapiens
KSEENILYL

SEQ ID NO: 8377 - protein, 8 aa, Homo sapiens
VSEVTLTL

SEQ ID NO: 8378 - protein, 9 aa, Homo sapiens
VMDHAFLLL

SEQ ID NO: 8379 - protein, 9 aa, Homo sapiens
VLDCCISLL

SEQ ID NO: 8380 - protein, 9 aa, Homo sapiens
QYPEFSIEL

SEQ ID NO: 8381 - protein, 9 aa, Homo sapiens
RAMCAMMSF

SEQ ID NO: 8382 - protein, 9 aa, Homo sapiens
SFEKGQGVL

SEQ ID NO: 8383 - protein, 10 aa, Homo sapiens
FQYPEFSIEL

SEQ ID NO: 8384 - protein, 10 aa, Homo sapiens
WEFQTSSPVF

SEQ ID NO: 8385 - protein, 9 aa, Homo sapiens
MASEVFTSF

SEQ ID NO: 8386 - protein, 9 aa, Homo sapiens
FSEVNGDRL

SEQ ID NO: 8387 - protein, 9 aa, Homo sapiens
FHVWTDAWM

SEQ ID NO: 8388 - protein, 9 aa, Homo sapiens
EFQTSSPVF

SEQ ID NO: 8389 - protein, 9 aa, Homo sapiens
VYDTRFVFS

SEQ ID NO: 8390 - protein, 8 aa, Homo sapiens
VYDTRFVF

SEQ ID NO: 8391 - protein, 10 aa, Homo sapiens
YYNTKQAVCF

SEQ ID NO: 8392 - protein, 9 aa, Homo sapiens
IFIVYDTRF

SEQ ID NO: 8393 - protein, 8 aa, Homo sapiens
VMDHAFLL

SEQ ID NO: 8394 - protein, 9 aa, Homo sapiens
VFCCGPSPL

SEQ ID NO: 8395 - protein, 8 aa, Homo sapiens
VLDCCISL

SEQ ID NO: 8396 - protein, 8 aa, Homo sapiens
HYNWQATL

SEQ ID NO: 8397 - protein, 9 aa, Homo sapiens
FRRGQVFHL

SEQ ID NO: 8398 - protein, 9 aa, Homo sapiens
RRRDITYEY

SEQ ID NO: 8399 - protein, 9 aa, Homo sapiens
MSFEKGQGV

SEQ ID NO: 8400 - protein, 9 aa, Homo sapiens
HYVGAARSI

SEQ ID NO: 8401 - protein, 9 aa, Homo sapiens
HRRPVKENF

SEQ ID NO: 8402 - protein, 9 aa, Homo sapiens
QVMDHAFLL

SEQ ID NO: 8403 - protein, 9 aa, Homo sapiens
DHYNWQATL

SEQ ID NO: 8404 - protein, 9 aa, Homo sapiens
IRKGDIFIV

SEQ ID NO: 8405 - protein, 10 aa, Homo sapiens
CRAMCAMMSF

SEQ ID NO: 8406 - protein, 9 aa, Homo sapiens
FHVWTDAWM

SEQ ID NO: 8407 - protein, 9 aa, Homo sapiens
KTYINSLAI

SEQ ID NO: 8408 - protein, 11 aa, Homo sapiens
FRRGQVFHLRL

SEQ ID NO: 8409 - protein, 8 aa, Homo sapiens
RRGQVFHL

SEQ ID NO: 8410 - protein, 8 aa, Homo sapiens
RRDPVLVC

SEQ ID NO: 8411 - protein, 8 aa, Homo sapiens
RRDITYEY

SEQ ID NO: 8412 - protein, 9 aa, Homo sapiens
RKGDIFIVY

SEQ ID NO: 8413 - protein, 9 aa, Homo sapiens
KSEENILYL

SEQ ID NO: 8414 - protein, 9 aa, Homo sapiens
RRGQVFHLR

SEQ ID NO: 8415 - protein, 10 aa, Homo sapiens
RRGQVFHLRL

SEQ ID NO: 8416 - protein, 9 aa, Homo sapiens
ERKEYILND

SEQ ID NO: 8417 - protein, 9 aa, Homo sapiens
DRRDPVLVC

SEQ ID NO: 8418 - protein, 9 aa, Homo sapiens
FRRGQVFHL

SEQ ID NO: 8419 - protein, 9 aa, Homo sapiens
SYHQLKLEF

SEQ ID NO: 8420 - protein, 9 aa, Homo sapiens
RRRDITYEY

SEQ ID NO: 8421 - protein, 9 aa, Homo sapiens
TYINSLAIL

SEQ ID NO: 8422 - protein, 9 aa, Homo sapiens
QYPEFSIEL

SEQ ID NO: 8423 - protein, 9 aa, Homo sapiens
HYVGAARSI

SEQ ID NO: 8424 - protein, 9 aa, Homo sapiens
RRPVKENFL

SEQ ID NO: 8425 - protein, 10 aa, Homo sapiens
FQYPEFSIEL

SEQ ID NO: 8426 - protein, 9 aa, Homo sapiens
FHVWTDAWM

SEQ ID NO: 8427 - protein, 9 aa, Homo sapiens
DHYNWQATL

SEQ ID NO: 8428 - protein, 9 aa, Homo sapiens
HRRPVKENF

SEQ ID NO: 8429 - protein, 9 aa, Homo sapiens
KRPDLPKGY

SEQ ID NO: 8430 - protein, 9 aa, Homo sapiens
RKGDIFIVY

SEQ ID NO: 8431 - protein, 10 aa, Homo sapiens
IRKGDIFIVY

SEQ ID NO: 8432 - protein, 9 aa, Homo sapiens
FKNTLAIPL

SEQ ID NO: 8433 - protein, 8 aa, Homo sapiens
AKHTLVVL

SEQ ID NO: 8434 - protein, 8 aa, Homo sapiens
RRGQVFHL

SEQ ID NO: 8435 - protein, 9 aa, Homo sapiens
RGDDANRNY

SEQ ID NO: 8436 - protein, 10 aa, Homo sapiens
KRGDDANRNY

SEQ ID NO: 8437 - protein, 12 aa, Homo sapiens
SRKRGDDANRNY

SEQ ID NO: 8438 - protein, 8 aa, Homo sapiens
GDDANRNY

SEQ ID NO: 8439 - protein, 9 aa, Homo sapiens
MSTSRKLKS

SEQ ID NO: 8440 - protein, 9 aa, Homo sapiens
KLKSHGMRR

SEQ ID NO: 8441 - protein, 9 aa, Homo sapiens
KSRSPHKGV

SEQ ID NO: 8442 - protein, 10 aa, Homo sapiens
KLKSHGMRRS

SEQ ID NO: 8443 - protein, 10 aa, Homo sapiens
RKLKSHGMRR

SEQ ID NO: 8444 - protein, 11 aa, Homo sapiens
STSRKLKSHGM

SEQ ID NO: 8445 - protein, 10 aa, Homo sapiens
SKSRSPHKGV

SEQ ID NO: 8446 - protein, 12 aa, Homo sapiens
MSTSRKLKSHGM

SEQ ID NO: 8447 - protein, 9 aa, Homo sapiens
RKYRKGNLK

SEQ ID NO: 8448 - protein, 9 aa, Homo sapiens
KSHGMRRSK

SEQ ID NO: 8449 - protein, 10 aa, Homo sapiens
KSRSPHKGVK

SEQ ID NO: 8450 - protein, 9 aa, Homo sapiens
RGDDANRNY

SEQ ID NO: 8451 - protein, 8 aa, Homo sapiens
SRSPHKGV

SEQ ID NO: 8452 - protein, 9 aa, Homo sapiens
KRGDDANRN

SEQ ID NO: 8453 - protein, 9 aa, Homo sapiens
NLKSRKRGD

SEQ ID NO: 8454 - protein, 9 aa, Homo sapiens
ANRNYRSHL

SEQ ID NO: 8455 - protein, 11 aa, Homo sapiens
KLKSHGMRRSK

SEQ ID NO: 8456 - protein, 9 aa, Homo sapiens
KLKSHGMRR

SEQ ID NO: 8457 - protein, 9 aa, Homo sapiens
RSKSRSPHK

SEQ ID NO: 8458 - protein, 9 aa, Homo sapiens
RKYRKGNLK

SEQ ID NO: 8459 - protein, 9 aa, Homo sapiens
RSPHKGVKR

SEQ ID NO: 8460 - protein, 9 aa, Homo sapiens
RSKSRSPHK

SEQ ID NO: 8461 - protein, 9 aa, Homo sapiens
KSHGMRRSK

SEQ ID NO: 8462 - protein, 10 aa, Homo sapiens
KSRSPHKGVK

SEQ ID NO: 8463 - protein, 12 aa, Homo sapiens
GSKRKYRKGNLK

SEQ ID NO: 8464 - protein, 9 aa, Homo sapiens
RSPHKGVKR

SEQ ID NO: 8465 - protein, 9 aa, Homo sapiens
RKYRKGNLK

SEQ ID NO: 8466 - protein, 9 aa, Homo sapiens
STSRKLKSH

SEQ ID NO: 8467 - protein, 9 aa, Homo sapiens
KYRKGNLKS

SEQ ID NO: 8468 - protein, 10 aa, Homo sapiens
KYRKGNLKSR

SEQ ID NO: 8469 - protein, 8 aa, Homo sapiens
KYRKGNLK

SEQ ID NO: 8470 - protein, 9 aa, Homo sapiens
RSKSRSPHK

SEQ ID NO: 8471 - protein, 9 aa, Homo sapiens
KSHGMRRSK

SEQ ID NO: 8472 - protein, 9 aa, Homo sapiens
KSRSPHKGV

SEQ ID NO: 8473 - protein, 9 aa, Homo sapiens
HGMRRSKSR

SEQ ID NO: 8474 - protein, 9 aa, Homo sapiens
KLKSHGMRR

SEQ ID NO: 8475 - protein, 9 aa, Homo sapiens
GVKRGGSKR

SEQ ID NO: 8476 - protein, 9 aa, Homo sapiens
YRKGNLKSR

SEQ ID NO: 8477 - protein, 10 aa, Homo sapiens
KYRKGNLKSR

SEQ ID NO: 8478 - protein, 9 aa, Homo sapiens
KSRSPHKGV

SEQ ID NO: 8479 - protein, 9 aa, Homo sapiens
SPHKGVKRG

SEQ ID NO: 8480 - protein, 10 aa, Homo sapiens
TSRKLKSHGM

SEQ ID NO: 8481 - protein, 9 aa, Homo sapiens
ANRNYRSHL

SEQ ID NO: 8482 - protein, 8 aa, Homo sapiens
SPHKGVKR

SEQ ID NO: 8483 - protein, 9 aa, Homo sapiens
SRKLKSHGM

SEQ ID NO: 8484 - protein, 10 aa, Homo sapiens
SKRKYRKGNL

SEQ ID NO: 8485 - protein, 10 aa, Homo sapiens
TSRKLKSHGM

SEQ ID NO: 8486 - protein, 9 aa, Homo sapiens
NLKSRKRGD

SEQ ID NO: 8487 - protein, 9 aa, Homo sapiens
KRKYRKGNL

SEQ ID NO: 8488 - protein, 8 aa, Homo sapiens
TSRKLKSH

SEQ ID NO: 8489 - protein, 9 aa, Homo sapiens
KSRSPHKGV

SEQ ID NO: 8490 - protein, 10 aa, Homo sapiens
SKSRSPHKGV

SEQ ID NO: 8491 - protein, 9 aa, Homo sapiens
ANRNYRSHL

SEQ ID NO: 8492 - protein, 9 aa, Homo sapiens
RSPHKGVKR

SEQ ID NO: 8493 - protein, 9 aa, Homo sapiens
GVKRGGSKR

SEQ ID NO: 8494 - protein, 10 aa, Homo sapiens
RKYRKGNLKS

SEQ ID NO: 8495 - protein, 9 aa, Homo sapiens
KSHGMRRSK

SEQ ID NO: 8496 - protein, 9 aa, Homo sapiens
KSRSPHKGV

SEQ ID NO: 8497 - protein, 9 aa, Homo sapiens
RGDDANRNY

SEQ ID NO: 8498 - protein, 8 aa, Homo sapiens
TSRKLKSH

SEQ ID NO: 8499 - protein, 8 aa, Homo sapiens
ANRNYRSH

SEQ ID NO: 8500 - protein, 9 aa, Homo sapiens
DANRNYRSH

SEQ ID NO: 8501 - protein, 9 aa, Homo sapiens
KSRSPHKGV

SEQ ID NO: 8502 - protein, 9 aa, Homo sapiens
ANRNYRSHL

SEQ ID NO: 8503 - protein, 12 aa, Homo sapiens
MSTSRKLKSHGM

SEQ ID NO: 8504 - protein, 9 aa, Homo sapiens
RSPHKGVKR

SEQ ID NO: 8505 - protein, 8 aa, Homo sapiens
RSPHKGVK

SEQ ID NO: 8506 - protein, 9 aa, Homo sapiens
KSHGMRRSK

SEQ ID NO: 8507 - protein, 9 aa, Homo sapiens
KSRSPHKGV

SEQ ID NO: 8508 - protein, 12 aa, Homo sapiens
MSTSRKLKSHGM

SEQ ID NO: 8509 - protein, 9 aa, Homo sapiens
RGDDANRNY

SEQ ID NO: 8510 - protein, 10 aa, Homo sapiens
DANRNYRSHL

SEQ ID NO: 8511 - protein, 9 aa, Homo sapiens
DANRNYRSH

SEQ ID NO: 8512 - protein, 9 aa, Homo sapiens
ANRNYRSHL

SEQ ID NO: 8513 - protein, 9 aa, Homo sapiens
KLKSHGMRR

SEQ ID NO: 8514 - protein, 9 aa, Homo sapiens
KSRSPHKGV

SEQ ID NO: 8515 - protein, 9 aa, Homo sapiens
RGDDANRNY

SEQ ID NO: 8516 - protein, 8 aa, Homo sapiens
RGDDANRN

SEQ ID NO: 8517 - protein, 8 aa, Homo sapiens
NRNYRSHL

SEQ ID NO: 8518 - protein, 9 aa, Homo sapiens
SRKLKSHGM

SEQ ID NO: 8519 - protein, 9 aa, Homo sapiens
KRKYRKGNL

SEQ ID NO: 8520 - protein, 9 aa, Homo sapiens
YRKGNLKSR

SEQ ID NO: 8521 - protein, 9 aa, Homo sapiens
KRGGSKRKY

SEQ ID NO: 8522 - protein, 10 aa, Homo sapiens
KRGDDANRNY

SEQ ID NO: 8523 - protein, 8 aa, Homo sapiens
RRSKSRSP

SEQ ID NO: 8524 - protein, 9 aa, Homo sapiens
SRKLKSHGM

SEQ ID NO: 8525 - protein, 9 aa, Homo sapiens
KRKYRKGNL

SEQ ID NO: 8526 - protein, 9 aa, Homo sapiens
YRKGNLKSR

SEQ ID NO: 8527 - protein, 9 aa, Homo sapiens
KRGGSKRKY

SEQ ID NO: 8528 - protein, 8 aa, Homo sapiens
NRNYRSHL

SEQ ID NO: 8529 - protein, 9 aa, Homo sapiens
SRSPHKGVK

SEQ ID NO: 8530 - protein, 10 aa, Homo sapiens
WLDVQVSNTY

SEQ ID NO: 8531 - protein, 9 aa, Homo sapiens
RTETSVGTY

SEQ ID NO: 8532 - protein, 10 aa, Homo sapiens
ARTETSVGTY

SEQ ID NO: 8533 - protein, 9 aa, Homo sapiens
LTEPEQREL

SEQ ID NO: 8534 - protein, 10 aa, Homo sapiens
KLGLTALVGL

SEQ ID NO: 8535 - protein, 9 aa, Homo sapiens
KLEAEIVTL

SEQ ID NO: 8536 - protein, 10 aa, Homo sapiens
GLMGTIKSKV

SEQ ID NO: 8537 - protein, 9 aa, Homo sapiens
KLTKLEAEI

SEQ ID NO: 8538 - protein, 9 aa, Homo sapiens
ALSTMGTLI

SEQ ID NO: 8539 - protein, 9 aa, Homo sapiens
GLIFNKYTL

SEQ ID NO: 8540 - protein, 10 aa, Homo sapiens
TLICRKLGGV

SEQ ID NO: 8541 - protein, 10 aa, Homo sapiens
RSFEGLMGTI

SEQ ID NO: 8542 - protein, 8 aa, Homo sapiens
KLGLTALV

SEQ ID NO: 8543 - protein, 9 aa, Homo sapiens
ALVGLRQNL

SEQ ID NO: 8544 - protein, 9 aa, Homo sapiens
KLGGVKKSA

SEQ ID NO: 8545 - protein, 8 aa, Homo sapiens
GLTALVGL

SEQ ID NO: 8546 - protein, 10 aa, Homo sapiens
TKLEAEIVTL

SEQ ID NO: 8547 - protein, 10 aa, Homo sapiens
RSFEGLIFNK

SEQ ID NO: 8548 - protein, 10 aa, Homo sapiens
STMGTLICRK

SEQ ID NO: 8549 - protein, 10 aa, Homo sapiens
VTLRHVLAAK

SEQ ID NO: 8550 - protein, 9 aa, Homo sapiens
GLMGTIKSK

SEQ ID NO: 8551 - protein, 11 aa, Homo sapiens
RSFEGLMGTIK

SEQ ID NO: 8552 - protein, 10 aa, Homo sapiens
STMGTLICRK

SEQ ID NO: 8553 - protein, 10 aa, Homo sapiens
RSFEGLIFNK

SEQ ID NO: 8554 - protein, 9 aa, Homo sapiens
STMGTLICR

SEQ ID NO: 8555 - protein, 10 aa, Homo sapiens
TFRSFEGLIF

SEQ ID NO: 8556 - protein, 12 aa, Homo sapiens
SFEGLIFNKYTL

SEQ ID NO: 8557 - protein, 9 aa, Homo sapiens
SFEGLMGTI

SEQ ID NO: 8558 - protein, 10 aa, Homo sapiens
TYESHSTSEL

SEQ ID NO: 8559 - protein, 9 aa, Homo sapiens
KKSATFRSF

SEQ ID NO: 8560 - protein, 9 aa, Homo sapiens
KTKLTKLEA

SEQ ID NO: 8561 - protein, 10 aa, Homo sapiens
RSFEGLIFNK

SEQ ID NO: 8562 - protein, 9 aa, Homo sapiens
KTSAALSTM

SEQ ID NO: 8563 - protein, 9 aa, Homo sapiens
VSNTYVKQK

SEQ ID NO: 8564 - protein, 9 aa, Homo sapiens
RSFEGLIFN

SEQ ID NO: 8565 - protein, 9 aa, Homo sapiens
STMGTLICR

SEQ ID NO: 8566 - protein, 9 aa, Homo sapiens
HVLAAKERR

SEQ ID NO: 8567 - protein, 10 aa, Homo sapiens
LSTMGTLICR

SEQ ID NO: 8568 - protein, 9 aa, Homo sapiens
GVKKSATFR

SEQ ID NO: 8569 - protein, 9 aa, Homo sapiens
EDLTEPEQR

SEQ ID NO: 8570 - protein, 8 aa, Homo sapiens
EAEIVTLR

SEQ ID NO: 8571 - protein, 10 aa, Homo sapiens
MPHARTETSV

SEQ ID NO: 8572 - protein, 10 aa, Homo sapiens
YVKQKTSAAL

SEQ ID NO: 8573 - protein, 9 aa, Homo sapiens
MPHARTETS

SEQ ID NO: 8574 - protein, 9 aa, Homo sapiens
NPKGEGSRI

SEQ ID NO: 8575 - protein, 10 aa, Homo sapiens
SAALSTMGTL

SEQ ID NO: 8576 - protein, 10 aa, Homo sapiens
YVKQKTSAAL

SEQ ID NO: 8577 - protein, 9 aa, Homo sapiens
YVKQKTSAA

SEQ ID NO: 8578 - protein, 9 aa, Homo sapiens
ELKTKLTKL

SEQ ID NO: 8579 - protein, 8 aa, Homo sapiens
ELKRKLGL

SEQ ID NO: 8580 - protein, 8 aa, Homo sapiens
LIFNKYTL

SEQ ID NO: 8581 - protein, 10 aa, Homo sapiens
RSFEGLMGTI

SEQ ID NO: 8582 - protein, 9 aa, Homo sapiens
AEIVTLRHV

SEQ ID NO: 8583 - protein, 10 aa, Homo sapiens
LDVQVSNTYV

SEQ ID NO: 8584 - protein, 9 aa, Homo sapiens
ALSTMGTLI

SEQ ID NO: 8585 - protein, 9 aa, Homo sapiens
KLEAEIVTL

SEQ ID NO: 8586 - protein, 9 aa, Homo sapiens
NLSKSWLDV

SEQ ID NO: 8587 - protein, 9 aa, Homo sapiens
KTSAALSTM

SEQ ID NO: 8588 - protein, 9 aa, Homo sapiens
YVKQKTSAA

SEQ ID NO: 8589 - protein, 9 aa, Homo sapiens
AALSTMGTL

SEQ ID NO: 8590 - protein, 9 aa, Homo sapiens
TSVGTYESH

SEQ ID NO: 8591 - protein, 8 aa, Homo sapiens
RSFEGLIF

SEQ ID NO: 8592 - protein, 9 aa, Homo sapiens
KTSAALSTM

SEQ ID NO: 8593 - protein, 9 aa, Homo sapiens
AALSTMGTL

SEQ ID NO: 8594 - protein, 10 aa, Homo sapiens
YVKQKTSAAL

SEQ ID NO: 8595 - protein, 8 aa, Homo sapiens
TEPEQREL

SEQ ID NO: 8596 - protein, 8 aa, Homo sapiens
ESHSTSEL

SEQ ID NO: 8597 - protein, 9 aa, Homo sapiens
YESHSTSEL

SEQ ID NO: 8598 - protein, 9 aa, Homo sapiens
AALSTMGTL

SEQ ID NO: 8599 - protein, 9 aa, Homo sapiens
KTSAALSTM

SEQ ID NO: 8600 - protein, 10 aa, Homo sapiens
SAALSTMGTL

SEQ ID NO: 8601 - protein, 9 aa, Homo sapiens
LTEPEQREL

SEQ ID NO: 8602 - protein, 9 aa, Homo sapiens
YESHSTSEL

SEQ ID NO: 8603 - protein, 9 aa, Homo sapiens
YESHSTSEL

SEQ ID NO: 8604 - protein, 9 aa, Homo sapiens
FRSFEGLIF

SEQ ID NO: 8605 - protein, 9 aa, Homo sapiens
SFEGLMGTI

SEQ ID NO: 8606 - protein, 10 aa, Homo sapiens
TYESHSTSEL

SEQ ID NO: 8607 - protein, 8 aa, Homo sapiens
SFEGLIFN

SEQ ID NO: 8608 - protein, 9 aa, Homo sapiens
KLEAEIVTL

SEQ ID NO: 8609 - protein, 9 aa, Homo sapiens
FRSFEGLIF

SEQ ID NO: 8610 - protein, 9 aa, Homo sapiens
KRKLGLTAL

SEQ ID NO: 8611 - protein, 8 aa, Homo sapiens
FRSFEGLM

SEQ ID NO: 8612 - protein, 8 aa, Homo sapiens
RSFEGLIF

SEQ ID NO: 8613 - protein, 9 aa, Homo sapiens
LTEPEQREL

SEQ ID NO: 8614 - protein, 8 aa, Homo sapiens
KSATFRSF

SEQ ID NO: 8615 - protein, 9 aa, Homo sapiens
FRSFEGLIF

SEQ ID NO: 8616 - protein, 9 aa, Homo sapiens
KRKLGLTAL

SEQ ID NO: 8617 - protein, 9 aa, Homo sapiens
TFRSFEGLM

SEQ ID NO: 8618 - protein, 10 aa, Homo sapiens
ARTETSVGTY

SEQ ID NO: 8619 - protein, 9 aa, Homo sapiens
FADFCMGMY

SEQ ID NO: 8620 - protein, 10 aa, Homo sapiens
SVDLYTHSEY

SEQ ID NO: 8621 - protein, 11 aa, Homo sapiens
SVDLYTHSEYY

SEQ ID NO: 8622 - protein, 10 aa, Homo sapiens
DTETPLALAY

SEQ ID NO: 8623 - protein, 11 aa, Homo sapiens
VIDKDAFGGVY

SEQ ID NO: 8624 - protein, 9 aa, Homo sapiens
FLLALLPLV

SEQ ID NO: 8625 - protein, 9 aa, Homo sapiens
FLMCNLAFA

SEQ ID NO: 8626 - protein, 9 aa, Homo sapiens
SLFSWLYRL

SEQ ID NO: 8627 - protein, 9 aa, Homo sapiens
KMFPDLTKV

SEQ ID NO: 8628 - protein, 9 aa, Homo sapiens
ALLGNVFVL

SEQ ID NO: 8629 - protein, 10 aa, Homo sapiens
CFLLALLPLV

SEQ ID NO: 8630 - protein, 9 aa, Homo sapiens
FLYAIFTKA

SEQ ID NO: 8631 - protein, 11 aa, Homo sapiens
SLFSWLYRLPL

SEQ ID NO: 8632 - protein, 9 aa, Homo sapiens
CMAPISFYA

SEQ ID NO: 8633 - protein, 10 aa, Homo sapiens
KSLFSWLYRL

SEQ ID NO: 8634 - protein, 10 aa, Homo sapiens
RFLMCNLAFA

SEQ ID NO: 8635 - protein, 9 aa, Homo sapiens
SLLALLGNV

SEQ ID NO: 8636 - protein, 10 aa, Homo sapiens
SLLDVSQTSV

SEQ ID NO: 8637 - protein, 9 aa, Homo sapiens
ILNKPLITV

SEQ ID NO: 8638 - protein, 9 aa, Homo sapiens
SLLVENVAV

SEQ ID NO: 8639 - protein, 9 aa, Homo sapiens
FLRIVVWFV

SEQ ID NO: 8640 - protein, 10 aa, Homo sapiens
KLYNNGFTSV

SEQ ID NO: 8641 - protein, 8 aa, Homo sapiens
ALLGNVFV

SEQ ID NO: 8642 - protein, 9 aa, Homo sapiens
ALAYIVFVL

SEQ ID NO: 8643 - protein, 10 aa, Homo sapiens
ITFAMRLDRK

SEQ ID NO: 8644 - protein, 10 aa, Homo sapiens
WLYRLPLGRK

SEQ ID NO: 8645 - protein, 9 aa, Homo sapiens
ALKELPLLK

SEQ ID NO: 8646 - protein, 9 aa, Homo sapiens
KLDAVYLNK

SEQ ID NO: 8647 - protein, 10 aa, Homo sapiens
ILLSKFGICK

SEQ ID NO: 8648 - protein, 10 aa, Homo sapiens
SLPPSTQTLK

SEQ ID NO: 8649 - protein, 10 aa, Homo sapiens
ITFAMRLDRK

SEQ ID NO: 8650 - protein, 9 aa, Homo sapiens
LILLTSHYK

SEQ ID NO: 8651 - protein, 9 aa, Homo sapiens
KSLFSWLYR

SEQ ID NO: 8652 - protein, 9 aa, Homo sapiens
AIFTKAFQR

SEQ ID NO: 8653 - protein, 9 aa, Homo sapiens
AVSGKGFCK

SEQ ID NO: 8654 - protein, 9 aa, Homo sapiens
SSMQSLRQR

SEQ ID NO: 8655 - protein, 9 aa, Homo sapiens
KSLSFETQK

SEQ ID NO: 8656 - protein, 9 aa, Homo sapiens
VYSTDIFFI

SEQ ID NO: 8657 - protein, 9 aa, Homo sapiens
HYKLNVPRF

SEQ ID NO: 8658 - protein, 9 aa, Homo sapiens
SYPSHCCAF

SEQ ID NO: 8659 - protein, 9 aa, Homo sapiens
LYAIFTKAF

SEQ ID NO: 8660 - protein, 9 aa, Homo sapiens
AYIVFVLTL

SEQ ID NO: 8661 - protein, 9 aa, Homo sapiens
IYVSIDVTL

SEQ ID NO: 8662 - protein, 11 aa, Homo sapiens
PYMTSIPVNAF

SEQ ID NO: 8663 - protein, 9 aa, Homo sapiens
IARNTWTLK

SEQ ID NO: 8664 - protein, 9 aa, Homo sapiens
KIRLRHACA

SEQ ID NO: 8665 - protein, 10 aa, Homo sapiens
AYRGQRVPPK

SEQ ID NO: 8666 - protein, 9 aa, Homo sapiens
RTIPSHAFS

SEQ ID NO: 8667 - protein, 9 aa, Homo sapiens
KLDAVYLNK

SEQ ID NO: 8668 - protein, 9 aa, Homo sapiens
GYKFLRIVV

SEQ ID NO: 8669 - protein, 10 aa, Homo sapiens
KNKYLTVIDK

SEQ ID NO: 8670 - protein, 9 aa, Homo sapiens
ALKELPLLK

SEQ ID NO: 8671 - protein, 9 aa, Homo sapiens
DIMGYKFLR

SEQ ID NO: 8672 - protein, 10 aa, Homo sapiens
YAIFTKAFQR

SEQ ID NO: 8673 - protein, 10 aa, Homo sapiens
EDIMGYKFLR

SEQ ID NO: 8674 - protein, 9 aa, Homo sapiens
AIFTKAFQR

SEQ ID NO: 8675 - protein, 9 aa, Homo sapiens
WYAITFAMR

SEQ ID NO: 8676 - protein, 9 aa, Homo sapiens
EHLKELIAR

SEQ ID NO: 8677 - protein, 9 aa, Homo sapiens
YVKIYITVR

SEQ ID NO: 8678 - protein, 9 aa, Homo sapiens
LPMDTETPL

SEQ ID NO: 8679 - protein, 10 aa, Homo sapiens
RPADLLQLVL

SEQ ID NO: 8680 - protein, 9 aa, Homo sapiens
IPSHAFSNL

SEQ ID NO: 8681 - protein, 10 aa, Homo sapiens
LPLGRKSLSF

SEQ ID NO: 8682 - protein, 11 aa, Homo sapiens
IPSLPPSTQTL

SEQ ID NO: 8683 - protein, 8 aa, Homo sapiens
APISFYAL

SEQ ID NO: 8684 - protein, 8 aa, Homo sapiens
RPADLLQL

SEQ ID NO: 8685 - protein, 11 aa, Homo sapiens
SLRQRKSVNAL

SEQ ID NO: 8686 - protein, 10 aa, Homo sapiens
YLNKNKYLTV

SEQ ID NO: 8687 - protein, 9 aa, Homo sapiens
TLKKLPLSL

SEQ ID NO: 8688 - protein, 9 aa, Homo sapiens
FSWLYRLPL

SEQ ID NO: 8689 - protein, 8 aa, Homo sapiens
DLLQLVLL

SEQ ID NO: 8690 - protein, 9 aa, Homo sapiens
TWTLKKLPL

SEQ ID NO: 8691 - protein, 9 aa, Homo sapiens
MRLDRKIRL

SEQ ID NO: 8692 - protein, 9 aa, Homo sapiens
TDIFFILEI

SEQ ID NO: 8693 - protein, 9 aa, Homo sapiens
TDFICMAPI

SEQ ID NO: 8694 - protein, 12 aa, Homo sapiens
ADFCMGMYLLLI

SEQ ID NO: 8695 - protein, 10 aa, Homo sapiens
FTDFICMAPI

SEQ ID NO: 8696 - protein, 9 aa, Homo sapiens
AQAYRGQRV

SEQ ID NO: 8697 - protein, 9 aa, Homo sapiens
RPADLLQLV

SEQ ID NO: 8698 - protein, 9 aa, Homo sapiens
KMFPDLTKV

SEQ ID NO: 8699 - protein, 9 aa, Homo sapiens
GQISEEYMQ

SEQ ID NO: 8700 - protein, 12 aa, Homo sapiens
YAFNGTKLDAVY

SEQ ID NO: 8701 - protein, 9 aa, Homo sapiens
FTSVQGYAF

SEQ ID NO: 8702 - protein, 10 aa, Homo sapiens
YAKVSICLPM

SEQ ID NO: 8703 - protein, 9 aa, Homo sapiens
MTSIPVNAF

SEQ ID NO: 8704 - protein, 10 aa, Homo sapiens
LSYPSHCCAF

SEQ ID NO: 8705 - protein, 8 aa, Homo sapiens
YAIFTKAF

SEQ ID NO: 8706 - protein, 10 aa, Homo sapiens
VAFVIVCCCY

SEQ ID NO: 8707 - protein, 10 aa, Homo sapiens
ALNSPLHQEY

SEQ ID NO: 8708 - protein, 9 aa, Homo sapiens
SLPPSTQTL

SEQ ID NO: 8709 - protein, 9 aa, Homo sapiens
MAPISFYAL

SEQ ID NO: 8710 - protein, 9 aa, Homo sapiens
FSWLYRLPL

SEQ ID NO: 8711 - protein, 9 aa, Homo sapiens
YAITFAMRL

SEQ ID NO: 8712 - protein, 9 aa, Homo sapiens
RLPLGRKSL

SEQ ID NO: 8713 - protein, 9 aa, Homo sapiens
LLPLGRKSL

SEQ ID NO: 8714 - protein, 9 aa, Homo sapiens
YAITFAMRL

SEQ ID NO: 8715 - protein, 9 aa, Homo sapiens
ISFYALSAI

SEQ ID NO: 8716 - protein, 9 aa, Homo sapiens
HAFSNLPNI

SEQ ID NO: 8717 - protein, 9 aa, Homo sapiens
FSWLYRLPL

SEQ ID NO: 8718 - protein, 9 aa, Homo sapiens
YSTDIFFIL

SEQ ID NO: 8719 - protein, 10 aa, Homo sapiens
LAYIVFVLTL

SEQ ID NO: 8720 - protein, 10 aa, Homo sapiens
FADFCMGMYL

SEQ ID NO: 8721 - protein, 9 aa, Homo sapiens
VYSGPSLLL

SEQ ID NO: 8722 - protein, 10 aa, Homo sapiens
FADFCMGMYL

SEQ ID NO: 8723 - protein, 9 aa, Homo sapiens
SYPSHCCAF

SEQ ID NO: 8724 - protein, 9 aa, Homo sapiens
SLPPSTQTL

SEQ ID NO: 8725 - protein, 9 aa, Homo sapiens
MFPDLTKVY

SEQ ID NO: 8726 - protein, 9 aa, Homo sapiens
FFEEQEDEI

SEQ ID NO: 8727 - protein, 9 aa, Homo sapiens
IFNTGLKMF

SEQ ID NO: 8728 - protein, 10 aa, Homo sapiens
FYNLSKVTHI

SEQ ID NO: 8729 - protein, 8 aa, Homo sapiens
VFVLLILL

SEQ ID NO: 8730 - protein, 9 aa, Homo sapiens
MRLDRKIRL

SEQ ID NO: 8731 - protein, 9 aa, Homo sapiens
IRNTRNLTY

SEQ ID NO: 8732 - protein, 9 aa, Homo sapiens
LRHACAIMV

SEQ ID NO: 8733 - protein, 9 aa, Homo sapiens
YKLNVPRFL

SEQ ID NO: 8734 - protein, 9 aa, Homo sapiens
MRPADLLQL

SEQ ID NO: 8735 - protein, 9 aa, Homo sapiens
HNMEDVYEL

SEQ ID NO: 8736 - protein, 9 aa, Homo sapiens
HNNAHYYVF

SEQ ID NO: 8737 - protein, 8 aa, Homo sapiens
KRMAVLIF

SEQ ID NO: 8738 - protein, 9 aa, Homo sapiens
MRPADLLQL

SEQ ID NO: 8739 - protein, 9 aa, Homo sapiens
IRNTRNLTY

SEQ ID NO: 8740 - protein, 9 aa, Homo sapiens
MRLDRKIRL

SEQ ID NO: 8741 - protein, 9 aa, Homo sapiens
SYPSHCCAF

SEQ ID NO: 8742 - protein, 9 aa, Homo sapiens
AYIVFVLTL

SEQ ID NO: 8743 - protein, 9 aa, Homo sapiens
HNNAHYYVF

SEQ ID NO: 8744 - protein, 9 aa, Homo sapiens
IYVSIDVTL

SEQ ID NO: 8745 - protein, 9 aa, Homo sapiens
YQDWQQNLY

SEQ ID NO: 8746 - protein, 11 aa, Homo sapiens
ASYQDWQQNLY

SEQ ID NO: 8747 - protein, 9 aa, Homo sapiens
VSAVSLAGY

SEQ ID NO: 8748 - protein, 9 aa, Homo sapiens
LLDQVQLGL

SEQ ID NO: 8749 - protein, 9 aa, Homo sapiens
FLSNFPFSL

SEQ ID NO: 8750 - protein, 10 aa, Homo sapiens
FLSNFPFSLL

SEQ ID NO: 8751 - protein, 10 aa, Homo sapiens
FLLDQVQLGL

SEQ ID NO: 8752 - protein, 10 aa, Homo sapiens
IFLSNFPFSL

SEQ ID NO: 8753 - protein, 10 aa, Homo sapiens
FLVLEAVAGA

SEQ ID NO: 8754 - protein, 9 aa, Homo sapiens
ALAIGLWGL

SEQ ID NO: 8755 - protein, 9 aa, Homo sapiens
SLLGLLALA

SEQ ID NO: 8756 - protein, 12 aa, Homo sapiens
YLIFLSNFPFSL

SEQ ID NO: 8757 - protein, 9 aa, Homo sapiens
GLLALAIGL

SEQ ID NO: 8758 - protein, 8 aa, Homo sapiens
FLLDQVQL

SEQ ID NO: 8759 - protein, 9 aa, Homo sapiens
ALGGLVVSA

SEQ ID NO: 8760 - protein, 9 aa, Homo sapiens
GLALGGLVV

SEQ ID NO: 8761 - protein, 9 aa, Homo sapiens
SLAGYLGAL

SEQ ID NO: 8762 - protein, 10 aa, Homo sapiens
AIGLWGLAVK

SEQ ID NO: 8763 - protein, 10 aa, Homo sapiens
SLSPGSSCVK

SEQ ID NO: 8764 - protein, 10 aa, Homo sapiens
VVSAVSLAGY

SEQ ID NO: 8765 - protein, 12 aa, Homo sapiens
ALAIGLWGLAVK

SEQ ID NO: 8766 - protein, 9 aa, Homo sapiens
RLLGALAAR

SEQ ID NO: 8767 - protein, 10 aa, Homo sapiens
SLSPGSSCVK

SEQ ID NO: 8768 - protein, 10 aa, Homo sapiens
AIGLWGLAVK

SEQ ID NO: 8769 - protein, 10 aa, Homo sapiens
VVSAVSLAGY

SEQ ID NO: 8770 - protein, 9 aa, Homo sapiens
AIAVVLLQG

SEQ ID NO: 8771 - protein, 9 aa, Homo sapiens
AVAGALVVA

SEQ ID NO: 8772 - protein, 9 aa, Homo sapiens
KYLIFLSNF

SEQ ID NO: 8773 - protein, 11 aa, Homo sapiens
KYLIFLSNFPF

SEQ ID NO: 8774 - protein, 10 aa, Homo sapiens
VKYLIFLSNF

SEQ ID NO: 8775 - protein, 11 aa, Homo sapiens
SYQDWQQNLYF

SEQ ID NO: 8776 - protein, 9 aa, Homo sapiens
SYQDWQQNL

SEQ ID NO: 8777 - protein, 9 aa, Homo sapiens
AARLLGALA

SEQ ID NO: 8778 - protein, 9 aa, Homo sapiens
AARRGAAYG

SEQ ID NO: 8779 - protein, 9 aa, Homo sapiens
RGFSGGILA

SEQ ID NO: 8780 - protein, 9 aa, Homo sapiens
SYQDWQQNL

SEQ ID NO: 8781 - protein, 9 aa, Homo sapiens
RFLLDQVQL

SEQ ID NO: 8782 - protein, 9 aa, Homo sapiens
DQCGFGVLR

SEQ ID NO: 8783 - protein, 10 aa, Homo sapiens
CGPPLRRWLR

SEQ ID NO: 8784 - protein, 9 aa, Homo sapiens
RLLGALAAR

SEQ ID NO: 8785 - protein, 8 aa, Homo sapiens
DSLEHTLR

SEQ ID NO: 8786 - protein, 9 aa, Homo sapiens
HYQDDPDLR

SEQ ID NO: 8787 - protein, 10 aa, Homo sapiens
TPKKGPAPSL

SEQ ID NO: 8788 - protein, 11 aa, Homo sapiens
LPADPMLGLAL

SEQ ID NO: 8789 - protein, 9 aa, Homo sapiens
SPGVQACSL

SEQ ID NO: 8790 - protein, 9 aa, Homo sapiens
LPADPMLGL

SEQ ID NO: 8791 - protein, 10 aa, Homo sapiens
APSLSPGSSC

SEQ ID NO: 8792 - protein, 10 aa, Homo sapiens
LLAARLLGAL

SEQ ID NO: 8793 - protein, 9 aa, Homo sapiens
ALAARRGAA

SEQ ID NO: 8794 - protein, 9 aa, Homo sapiens
FLSNFPFSL

SEQ ID NO: 8795 - protein, 9 aa, Homo sapiens
DAAQRVVYL

SEQ ID NO: 8796 - protein, 9 aa, Homo sapiens
PPETKHQAL

SEQ ID NO: 8797 - protein, 8 aa, Homo sapiens
DPMLGLAL

SEQ ID NO: 8798 - protein, 9 aa, Homo sapiens
LEAVAGALV

SEQ ID NO: 8799 - protein, 10 aa, Homo sapiens
LEAVAGALVV

SEQ ID NO: 8800 - protein, 9 aa, Homo sapiens
LAFLVLEAV

SEQ ID NO: 8801 - protein, 9 aa, Homo sapiens
GLALGGLVV

SEQ ID NO: 8802 - protein, 9 aa, Homo sapiens
GLWGLAVKG

SEQ ID NO: 8803 - protein, 10 aa, Homo sapiens
RLDADAAQRV

SEQ ID NO: 8804 - protein, 9 aa, Homo sapiens
LAARRGAAY

SEQ ID NO: 8805 - protein, 9 aa, Homo sapiens
FLSNFPFSL

SEQ ID NO: 8806 - protein, 9 aa, Homo sapiens
LAARLLGAL

SEQ ID NO: 8807 - protein, 9 aa, Homo sapiens
FSLLGLLAL

SEQ ID NO: 8808 - protein, 9 aa, Homo sapiens
SSCVKYLIF

SEQ ID NO: 8809 - protein, 9 aa, Homo sapiens
VHRPPTSGC

SEQ ID NO: 8810 - protein, 9 aa, Homo sapiens
TLRVAIAHY

SEQ ID NO: 8811 - protein, 9 aa, Homo sapiens
FLSNFPFSL

SEQ ID NO: 8812 - protein, 9 aa, Homo sapiens
LSNFPFSLL

SEQ ID NO: 8813 - protein, 9 aa, Homo sapiens
YLEGCGPPL

SEQ ID NO: 8814 - protein, 10 aa, Homo sapiens
SSPGVQACSL

SEQ ID NO: 8815 - protein, 9 aa, Homo sapiens
NFPFSLLGL

SEQ ID NO: 8816 - protein, 9 aa, Homo sapiens
ADPMLGLAL

SEQ ID NO: 8817 - protein, 9 aa, Homo sapiens
LAASGGYAI

SEQ ID NO: 8818 - protein, 9 aa, Homo sapiens
FSLLGLLAL

SEQ ID NO: 8819 - protein, 9 aa, Homo sapiens
LAARLLGAL

SEQ ID NO: 8820 - protein, 8 aa, Homo sapiens
YAIAVVLL

SEQ ID NO: 8821 - protein, 9 aa, Homo sapiens
LSNFPFSLL

SEQ ID NO: 8822 - protein, 9 aa, Homo sapiens
YQDDPDLRF

SEQ ID NO: 8823 - protein, 9 aa, Homo sapiens
FLSNFPFSL

SEQ ID NO: 8824 - protein, 9 aa, Homo sapiens
YQDWQQNLY

SEQ ID NO: 8825 - protein, 9 aa, Homo sapiens
NFPFSLLGL

SEQ ID NO: 8826 - protein, 9 aa, Homo sapiens
GYAIAVVLL

SEQ ID NO: 8827 - protein, 9 aa, Homo sapiens
LRRWLRANL

SEQ ID NO: 8828 - protein, 9 aa, Homo sapiens
FLSNFPFSL

SEQ ID NO: 8829 - protein, 9 aa, Homo sapiens
HRPPTSGCL

SEQ ID NO: 8830 - protein, 10 aa, Homo sapiens
RGFSGGILAF

SEQ ID NO: 8831 - protein, 9 aa, Homo sapiens
CLGPVPRED

SEQ ID NO: 8832 - protein, 9 aa, Homo sapiens
SYQDWQQNL

SEQ ID NO: 8833 - protein, 9 aa, Homo sapiens
FLSNFPFSL

SEQ ID NO: 8834 - protein, 9 aa, Homo sapiens
HRPPTSGCL

SEQ ID NO: 8835 - protein, 8 aa, Homo sapiens
KKGPAPSL

SEQ ID NO: 8836 - protein, 9 aa, Homo sapiens
SSCPAFLRY

SEQ ID NO: 8837 - protein, 9 aa, Homo sapiens
YTDIMDPML

SEQ ID NO: 8838 - protein, 10 aa, Homo sapiens
RSSCPAFLRY

SEQ ID NO: 8839 - protein, 11 aa, Homo sapiens
LTGLSRLGLAY

SEQ ID NO: 8840 - protein, 10 aa, Homo sapiens
YTDIMDPMLN

SEQ ID NO: 8841 - protein, 12 aa, Homo sapiens
YTDIMDPMLNAV

SEQ ID NO: 8842 - protein, 9 aa, Homo sapiens
RLYDYLQQL

SEQ ID NO: 8843 - protein, 9 aa, Homo sapiens
IMDPMLNAV

SEQ ID NO: 8844 - protein, 10 aa, Homo sapiens
FLSPPFLHML

SEQ ID NO: 8845 - protein, 9 aa, Homo sapiens
SLMRQHVSV

SEQ ID NO: 8846 - protein, 9 aa, Homo sapiens
FLHMLQDLV

SEQ ID NO: 8847 - protein, 10 aa, Homo sapiens
IRLYDYLQQL

SEQ ID NO: 8848 - protein, 9 aa, Homo sapiens
LLWFMPCLA

SEQ ID NO: 8849 - protein, 9 aa, Homo sapiens
LLLWFMPCL

SEQ ID NO: 8850 - protein, 9 aa, Homo sapiens
FLSPPFLHM

SEQ ID NO: 8851 - protein, 9 aa, Homo sapiens
GLLTGLSRL

SEQ ID NO: 8852 - protein, 9 aa, Homo sapiens
VQDPHLIKV

SEQ ID NO: 8853 - protein, 9 aa, Homo sapiens
GLGDSANRV

SEQ ID NO: 8854 - protein, 9 aa, Homo sapiens
GLLSNTGLV

SEQ ID NO: 8855 - protein, 9 aa, Homo sapiens
VLATEAPRL

SEQ ID NO: 8856 - protein, 9 aa, Homo sapiens
QLHENPQSL

SEQ ID NO: 8857 - protein, 10 aa, Homo sapiens
RLYDYLQQLH

SEQ ID NO: 8858 - protein, 10 aa, Homo sapiens
LIKVTVKTPK

SEQ ID NO: 8859 - protein, 10 aa, Homo sapiens
APVQDPHLIK

SEQ ID NO: 8860 - protein, 10 aa, Homo sapiens
GLSRLGLAYR

SEQ ID NO: 8861 - protein, 9 aa, Homo sapiens
RLYDYLQQL

SEQ ID NO: 8862 - protein, 9 aa, Homo sapiens
RLLLWFMPC

SEQ ID NO: 8863 - protein, 9 aa, Homo sapiens
GLSRLGLAY

SEQ ID NO: 8864 - protein, 9 aa, Homo sapiens
RSSCPAFLR

SEQ ID NO: 8865 - protein, 10 aa, Homo sapiens
APVQDPHLIK

SEQ ID NO: 8866 - protein, 10 aa, Homo sapiens
TDTCTIQQLK

SEQ ID NO: 8867 - protein, 9 aa, Homo sapiens
SSCPAFLRY

SEQ ID NO: 8868 - protein, 9 aa, Homo sapiens
SVAGGIESR

SEQ ID NO: 8869 - protein, 9 aa, Homo sapiens
PVQDPHLIK

SEQ ID NO: 8870 - protein, 9 aa, Homo sapiens
RFPNFLGII

SEQ ID NO: 8871 - protein, 10 aa, Homo sapiens
IYPADGPPAF

SEQ ID NO: 8872 - protein, 9 aa, Homo sapiens
RVPFAPLSF

SEQ ID NO: 8873 - protein, 10 aa, Homo sapiens
TYLQGTASAL

SEQ ID NO: 8874 - protein, 10 aa, Homo sapiens
MYTDIMDPML

SEQ ID NO: 8875 - protein, 10 aa, Homo sapiens
PLPNPPPEVF

SEQ ID NO: 8876 - protein, 9 aa, Homo sapiens
GFPDQPSSL

SEQ ID NO: 8877 - protein, 10 aa, Homo sapiens
RNRFPNFLGI

SEQ ID NO: 8878 - protein, 10 aa, Homo sapiens
KGRSSCPAFL

SEQ ID NO: 8879 - protein, 10 aa, Homo sapiens
RSMGFLNREA

SEQ ID NO: 8880 - protein, 9 aa, Homo sapiens
LSRLGLAYR

SEQ ID NO: 8881 - protein, 9 aa, Homo sapiens
PVQDPHLIK

SEQ ID NO: 8882 - protein, 9 aa, Homo sapiens
RLYDYLQQL

SEQ ID NO: 8883 - protein, 9 aa, Homo sapiens
RQIEQGLQV

SEQ ID NO: 8884 - protein, 10 aa, Homo sapiens
GVRDGLTVHL

SEQ ID NO: 8885 - protein, 9 aa, Homo sapiens
LSRLGLAYR

SEQ ID NO: 8886 - protein, 9 aa, Homo sapiens
QVLATEAPR

SEQ ID NO: 8887 - protein, 10 aa, Homo sapiens
IMRQTLEFLR

SEQ ID NO: 8888 - protein, 11 aa, Homo sapiens
MANPRALQALR

SEQ ID NO: 8889 - protein, 9 aa, Homo sapiens
SVAGGIESR

SEQ ID NO: 8890 - protein, 8 aa, Homo sapiens
DAPDIRNR

SEQ ID NO: 8891 - protein, 9 aa, Homo sapiens
QLKEEISQR

SEQ ID NO: 8892 - protein, 8 aa, Homo sapiens
ESVAIKGR

SEQ ID NO: 8893 - protein, 10 aa, Homo sapiens
YPRSLRPDGM

SEQ ID NO: 8894 - protein, 8 aa, Homo sapiens
SPAYPRSL

SEQ ID NO: 8895 - protein, 9 aa, Homo sapiens
LPQGSPAPV

SEQ ID NO: 8896 - protein, 10 aa, Homo sapiens
LPSPAYPRSL

SEQ ID NO: 8897 - protein, 9 aa, Homo sapiens
FPALDSAEL

SEQ ID NO: 8898 - protein, 9 aa, Homo sapiens
YPADGPPAF

SEQ ID NO: 8899 - protein, 9 aa, Homo sapiens
LPNPPPEVF

SEQ ID NO: 8900 - protein, 9 aa, Homo sapiens
NPQSLGTYL

SEQ ID NO: 8901 - protein, 9 aa, Homo sapiens
SLMRQHVSV

SEQ ID NO: 8902 - protein, 9 aa, Homo sapiens
VIKRQHRAM

SEQ ID NO: 8903 - protein, 8 aa, Homo sapiens
LMRQHVSV

SEQ ID NO: 8904 - protein, 10 aa, Homo sapiens
LVIKRQHRAM

SEQ ID NO: 8905 - protein, 9 aa, Homo sapiens
DPHLIKVTV

SEQ ID NO: 8906 - protein, 8 aa, Homo sapiens
ILKDPDSL

SEQ ID NO: 8907 - protein, 9 aa, Homo sapiens
TGLVRQLVL

SEQ ID NO: 8908 - protein, 8 aa, Homo sapiens
DGPPAFSL

SEQ ID NO: 8909 - protein, 9 aa, Homo sapiens
RQIEQGLQV

SEQ ID NO: 8910 - protein, 10 aa, Homo sapiens
RDGLTVHLVI

SEQ ID NO: 8911 - protein, 9 aa, Homo sapiens
RDGLTVHLV

SEQ ID NO: 8912 - protein, 9 aa, Homo sapiens
LSFSPTAAI

SEQ ID NO: 8913 - protein, 10 aa, Homo sapiens
LESIPGGYNV

SEQ ID NO: 8914 - protein, 9 aa, Homo sapiens
RLYDYLQQL

SEQ ID NO: 8915 - protein, 9 aa, Homo sapiens
VQDPHLIKV

SEQ ID NO: 8916 - protein, 9 aa, Homo sapiens
HLIKVTVKT

SEQ ID NO: 8917 - protein, 9 aa, Homo sapiens
FSVTDTCTI

SEQ ID NO: 8918 - protein, 9 aa, Homo sapiens
FLSPPFLHM

SEQ ID NO: 8919 - protein, 9 aa, Homo sapiens
LSFSPTAAI

SEQ ID NO: 8920 - protein, 9 aa, Homo sapiens
AAMANPRAL

SEQ ID NO: 8921 - protein, 9 aa, Homo sapiens
VAIKGRSSC

SEQ ID NO: 8922 - protein, 9 aa, Homo sapiens
AAIPGIPEP

SEQ ID NO: 8923 - protein, 9 aa, Homo sapiens
QLHENPQSL

SEQ ID NO: 8924 - protein, 9 aa, Homo sapiens
YPADGPPAF

SEQ ID NO: 8925 - protein, 9 aa, Homo sapiens
SVPEFVTQL

SEQ ID NO: 8926 - protein, 9 aa, Homo sapiens
LSPPFLHML

SEQ ID NO: 8927 - protein, 9 aa, Homo sapiens
YLQGTASAL

SEQ ID NO: 8928 - protein, 9 aa, Homo sapiens
FLSPPFLHM

SEQ ID NO: 8929 - protein, 9 aa, Homo sapiens
SIPGGYNVL

SEQ ID NO: 8930 - protein, 9 aa, Homo sapiens
NLPDLVSGL

SEQ ID NO: 8931 - protein, 9 aa, Homo sapiens
PSPAYPRSL

SEQ ID NO: 8932 - protein, 9 aa, Homo sapiens
AAMANPRAL

SEQ ID NO: 8933 - protein, 9 aa, Homo sapiens
LSFSPTAAI

SEQ ID NO: 8934 - protein, 9 aa, Homo sapiens
FSVTDTCTI

SEQ ID NO: 8935 - protein, 9 aa, Homo sapiens
FSLGLLTGL

SEQ ID NO: 8936 - protein, 9 aa, Homo sapiens
FLSPPFLHM

SEQ ID NO: 8937 - protein, 9 aa, Homo sapiens
KAHPDQLVL

SEQ ID NO: 8938 - protein, 9 aa, Homo sapiens
LATEAPRLL

SEQ ID NO: 8939 - protein, 9 aa, Homo sapiens
FPDQPSSLM

SEQ ID NO: 8940 - protein, 9 aa, Homo sapiens
MYTDIMDPM

SEQ ID NO: 8941 - protein, 9 aa, Homo sapiens
YTDIMDPML

SEQ ID NO: 8942 - protein, 9 aa, Homo sapiens
FLSPPFLHM

SEQ ID NO: 8943 - protein, 8 aa, Homo sapiens
LYDYLQQL

SEQ ID NO: 8944 - protein, 9 aa, Homo sapiens
IMDPMLNAV

SEQ ID NO: 8945 - protein, 9 aa, Homo sapiens
VRDGLTVHL

SEQ ID NO: 8946 - protein, 10 aa, Homo sapiens
VFPALDSAEL

SEQ ID NO: 8947 - protein, 9 aa, Homo sapiens
IRNRFPNFL

SEQ ID NO: 8948 - protein, 9 aa, Homo sapiens
NRFPNFLGI

SEQ ID NO: 8949 - protein, 9 aa, Homo sapiens
GRSSCPAFL

SEQ ID NO: 8950 - protein, 9 aa, Homo sapiens
RLYDYLQQL

SEQ ID NO: 8951 - protein, 10 aa, Homo sapiens
IRLYDYLQQL

SEQ ID NO: 8952 - protein, 9 aa, Homo sapiens
VRDGLTVHL

SEQ ID NO: 8953 - protein, 8 aa, Homo sapiens
IRSQDRVL

SEQ ID NO: 8954 - protein, 9 aa, Homo sapiens
SIPGGYNVL

SEQ ID NO: 8955 - protein, 9 aa, Homo sapiens
KAHPDQLVL

SEQ ID NO: 8956 - protein, 9 aa, Homo sapiens
IRNRFPNFL

SEQ ID NO: 8957 - protein, 9 aa, Homo sapiens
NRFPNFLGI

SEQ ID NO: 8958 - protein, 9 aa, Homo sapiens
RLYDYLQQL

SEQ ID NO: 8959 - protein, 9 aa, Homo sapiens
MYTDIMDPM

SEQ ID NO: 8960 - protein, 10 aa, Homo sapiens
NRVPFAPLSF

SEQ ID NO: 8961 - protein, 10 aa, Homo sapiens
MRQHVSVPEF

SEQ ID NO: 8962 - protein, 8 aa, Homo sapiens
NRVPFAPL

SEQ ID NO: 8963 - protein, 10 aa, Homo sapiens
FLRPGDDSTL

SEQ ID NO: 8964 - protein, 12 aa, Homo sapiens
FYDPEPILCPCF

SEQ ID NO: 8965 - protein, 6 aa, synthetic construct
  REGION 1..6: note = Description of Artificial Sequence: Synthetic 6xHis tag
HHHHHH

SEQ ID NO: 8966 - protein, 11 aa, Homo sapiens
KIWEELSVLEV

SEQ ID NO: 8967 - protein, 9 aa, Homo sapiens
GLSNLTHVL

SEQ ID NO: 8968 - protein, 10 aa, Homo sapiens
MPMQDIKMIL

SEQ ID NO: 8969 - protein, 9 aa, synthetic construct
  REGION 1..9: note = Description of Artificial Sequence: Synthetic peptide
HPEYNRPLL

SEQ ID NO: 8970 - protein, 120 aa, Homo sapiens
MERRRLWGSIQSRYISMSVWTSPRRLVELAGQSLLKDEALAIAALELLPRELFPPLFMAAFDGRHSQTLKAMVQAWPFTCLPLGVLMKGQHLHLETFKAVLDGLDVLLAQEVRPRRWKLQ
